(19) United States
(12) Patent Application Publication
(10) Pub. No.: US 2021/0171971 A1
(43) Pub. Date: Jun. 10, 2021

(54) INTERACTORS AND TARGETS FOR IMPROVING PLANT AGRONOMIC CHARACTERISTICS

(71) Applicant: PIONEER HI-BRED INTERNATIONAL, INC., JOHNSTON, IA (US)

(72) Inventors: KRISTIN HAUG COLLET, DES MOINES, IA (US); ZHENGLIN HOU, ANKENY, IA (US); SHAI LAWIT, URBANDALE, IA (US); ROSANA MELO, ST. CHARLES, MO (US); NICHOLAS MONGAR, JOHNSTON, IA (US); JOHN VAN HEMERT, JOHNSTON, IA (US); JINGRUI WU, JOHNSTON, IA (US); WENGANG ZHOU, SAN MATEO, CA (US)

(73) Assignee: PIONEER HI-BRED INTERNATIONAL, INC., JOHNSTON, IA (US)

(21) Appl. No.: 17/048,038

(22) PCT Filed: Apr. 16, 2019
(86) PCT No.: PCT/US19/27617

§ 371 Date: Oct. 15, 2020

Related U.S. Application Data
(60) Provisional application No. 62/778,086, filed on Dec. 11, 2018.
(60) Provisional application No. 62/741,529, filed on Oct. 4, 2018.
(60) Provisional application No. 62/659,579, filed on Apr. 18, 2018.

(51) Int. Cl. C12N 15/82

(52) U.S. Cl. CPC C12N 15/8261; C12N 15/8271; C12N 15/8213; C12N 15/8269

(57) ABSTRACT

Provided are compositions comprising polynucleotides encoding polypeptides. Also provided are recombinant DNA constructs, plants, plant cells, seed, grain comprising the polynucleotides, and plants, plant cells, seed, grain comprising a genetic modification at a genomic locus encoding a polypeptide. Additionally, various methods of employing the polynucleotides and genetic modifications in plants, such as methods for modulating expression level in a plant and methods for increasing yield of a plant are also provided herein.

### REFERENCE TO SEQUENCE LISTING SUBMITTED ELECTRONICALLY

[0001] The official copy of the sequence listing is submitted electronically via EFS-Web as an ASCII formatted sequence listing with a file named 7841_ST25.txt created on Dec. 7, 2018 and having a size of 1897 kilobytes and is filed concurrently with the specification. The sequence listing comprised in this ASCII formatted document is part of the specification and is herein incorporated by reference in its entirety.

### FIELD

[0002] This disclosure relates to compositions and methods for improving yield in plants.

### BACKGROUND

[0003] Global demand and consumption of agricultural crops is increasing at a rapid pace. Accordingly, there is a need to develop new compositions and methods to increase yield in plants. This invention provides such compositions and methods.

### SUMMARY

[0004] Provided herein are polynucleotides encoding a polypeptide comprising an amino acid sequence that is at least 90%, 92%, 95%, 96%, 97%, 98%, 99% or 100% identical to a full length amino acid sequence selected from the group consisting of SEQ ID NOS: 1-11, 23-31, 40-299, 563, 565, and 567-573. Provided herein are polynucleotides that are at least 85% identical to a polynucleotide sequence selected from the group consisting of SEQ ID NOS: 12-22, 32-39, and 300-561.

[0005] Provided herein are SEQ ID NOS: 1-11 (Interactor Polypeptides); SEQ ID NOS: 12-22 (polynucleotides encoding Interactor Polypeptides); SEQ ID NOS: 23-31, 563, and 567-572 (Direct Target Polypeptides); SEQ ID NOS: 32-39, 564, and 573-579 (polynucleotides encoding Direct Target Polypeptides); SEQ ID NOS: 40-299 (Differentially Expressed Polypeptides); SEQ ID NOS: 300-561 (polynucleotides encoding Differentially Expressed Polupeptides); SEQ ID NOS: 223-284 (Down Regulated Polypeptides); SEQ ID NOS: 485-547 (polynucleotides encoding Down Regulated Polypeptides).

[0006] Also provided are recombinant DNA constructs comprising a regulatory element operably linked to a polynucleotide encoding a polypeptide comprising an amino acid sequence that is at least 80% to 100% identical to a full length amino acid sequence selected from the group consisting of SEQ ID NOS: 1-11, 23-31, 40-299, 563, 565, and 567-573. In certain embodiments the regulatory element is a heterologous promoter.

[0007] Also provided are recombinant DNA constructs comprising a genetic element that suppresses or reduces expression of a polynucleotide encoding a polypeptide comprising an amino acid sequence that is at least 80% to about 100% identical to an amino acid sequence selected from the group consisting of SEQ ID NOS: 223-284 (Down Regulated Polypeptides). In certain embodiments the reduction in expression is performed by RNAi mechanism.

[0008] Provided are plant cells, plants, and seeds comprising the polynucleotide encoding a polypeptide or the recombinant DNA construct comprising a regulatory element operably linked to the polynucleotide encoding a polypeptide. In certain embodiments, the regulatory element is a heterologous promoter. In certain embodiments, the plant and/or seed is from a monocot plant. In certain embodiments, the plant is a monocot plant. In certain embodiments, the monocot plant is maize.

[0009] Further provided are plant cells, plants, and seeds comprising a targeted genetic modification at a genomic locus that encodes a polypeptide comprising an amino acid sequence that is at least 80% to about 100% identical to a full length amino acid sequence selected from the group consisting of SEQ ID NOS: 1-11, 23-31, 40-299, 563, 565, and 567-573, wherein the genetic modification increases the level and/or activity of the encoded polypeptide. In certain embodiments, the genetic modification is selected from the group consisting of an insertion, deletion, single nucleotide polymorphism (SNP), and a polynucleotide modification. In certain embodiments the targeted genetic modification is present in (a) the coding region; (b) a non-coding region; (c) a regulatory sequence; (d) an untranslated region; or (e) any combination of (a)-(d) of the genomic locus that encodes the polypeptide. In certain embodiments, the plant and/or seed is from a monocot plant. In certain embodiments, the plant is a monocot plant. In certain embodiments, the monocot plant is maize.

[0010] Provided are methods for increasing yield in a plant by expressing in a regenerable plant cell a recombinant DNA construct comprising a regulatory element operably linked to a polynucleotide encoding a polypeptide comprising an amino acid sequence that is at least 80% to about 100% identical to an amino acid sequence selected from the group consisting of SEQ ID NOS: 1-11, 23-31, 40-299, 563, 565, and 567-573; and generating the plant, wherein the plant comprises in its genome the recombinant DNA construct. In certain embodiments, the regulatory element is a heterologous promoter. In certain embodiments, the plant is a monocot plant. In certain embodiments, the monocot plant is maize. In certain embodiments, the yield is grain yield.

[0011] Further provided are methods for increasing yield in a plant by introducing in a regenerable plant cell a targeted genetic modification at a genomic locus that encodes a polypeptide comprising an amino acid sequence that is at least 80% identical to an amino acid sequence selected from the group consisting of SEQ ID NOS: 1-11, 23-31, 40-299, 563, 565, and 567-573; and generating the plant, wherein the level and/or activity of the encoded polypeptide is increased in the plant. In certain embodiments, the genetic modification is introduced using a genome modification technique selected from the group consisting of a polynucleotide-guided endonuclease, CRISPR-Cas endonucleases, base editing deaminases, a zinc finger nuclease, a transcription activator-like effector nuclease (TALEN), an engineered site-specific meganucleases, or an Argonaute. In certain embodiments, the targeted genetic modification is present in (a) the coding region; (b) a non-coding region; (c) a regulatory sequence; (d) an untranslated region; or (e) any combination of (a)-(d) of the genomic locus that encodes the polypeptide. In certain embodiments, the plant cell is from a monocot plant. In certain embodiments, the monocot plant is maize. In certain embodiments, the yield is grain yield.

[0012] Provided are methods for increasing photosynthetic activity in a plant by expressing in a regenerable plant cell a recombinant DNA construct comprising a regulatory element operably linked to a polynucleotide encoding a polypeptide comprising an amino acid sequence that is at least 80% identical to an amino acid sequence selected from the group consisting of SEQ ID NOS: 1-11, 23-31, 40-299, 563, 565, and 567-573; and generating the plant, wherein the plant comprises in its genome the recombinant DNA construct. In certain embodiments, the regulatory element is a heterologous promoter. In certain embodiments, the plant is a monocot plant. In certain embodiments, the monocot plant is maize.

[0013] Also provided are methods for increasing photosynthetic activity in a plant by introducing in a regenerable plant cell a targeted genetic modification at a genomic locus that encodes a polypeptide comprising an amino acid sequence that is at least 80% identical to an amino acid sequence selected from the group consisting of SEQ ID NOS: 1-11, 23-31, 40-299, 563, 565, and 567-573; and generating the plant, wherein the level and/or activity of the encoded polypeptide is increased in the plant. In certain embodiments, the genetic modification is introduced using a genome modification technique selected from the group consisting of a polynucleotide-guided endonuclease, CRISPR-Cas endonucleases, base editing deaminases, a zinc finger nuclease, a transcription activator-like effector nuclease (TALEN), an engineered site-specific meganucleases, or an Argonaute. In certain embodiments, the targeted genetic modification is present in (a) the coding region; (b) a non-coding region; (c) a regulatory sequence; (d) an untranslated region; or (e) any combination of (a)-(d) of the genomic locus that encodes the polypeptide. In certain embodiments, the plant cell is from a monocot plant. In certain embodiments, the monocot plant is maize.

### BRIEF DESCRIPTION OF THE DRAWINGS AND SEQUENCE LISTING

[0014] The disclosure can be more fully understood from the following detailed description and the accompanying drawings and Sequence Listing, which form a part of this application.

[0015] The sequence descriptions and sequence listing attached hereto comply with the rules governing nucleotide and amino acid sequence disclosures in patent applications as set forth in 37 C.F.R. §§ 1.821 and 1.825. The sequence descriptions comprise the three letter codes for amino acids as defined in 37 C.F.R. §§ 1.821 and 1.825, which are incorporated herein by reference.

TABLE 1A
Sequence Listing Description- Interactors and Direct Targets

| | | Functional Annotation |
|---|---|---|
| Interactors | | |
| SEQ ID NO: 1 | GRMZM2G160687 (zag2 - Zea AGAMOUS | DNA-binding transcription factor |
| | homolog2) | activity |
| SEQ ID NO: 2 | GRMZM2G160565 (bde1 - bearded-ear1; | DNA-binding transcription factor |
| | ZmMADS56) | activity |
| SEQ ID NO: 3 | GRMZM2G072582 (mads3 - MADS3; | DNA-binding transcription factor |
| | ZmZAPL) | activity |
| SEQ ID NO: 4 | GRMZM2G099522 (zmm14 - Zea mays | DNA-binding transcription factor |
| | MADS14; ZmM5) | activity |
| SEQ ID NO: 5 | GRMZM2G159397 (zmm6 - Zea mays | DNA-binding transcription factor |
| | MADS6) | activity |
| SEQ ID NO: 6 | GRMZM2G097059 (zmm7 - Zea mays | DNA-binding transcription factor |
| | MADS7) | activity |
| SEQ ID NO: 7 | GRMZM2G087095 (zmm24 - Zea mays | DNA-binding transcription factor |
| | MADS24) | activity |
| SEQ ID NO: 8 | GRMZM5G814279 (mads74 - MADS- | DNA-binding transcription factor |
| | transcription factor 74, ZmMADS47-like) | activity |
| SEQ ID NO: 9 | GRMZM2G059102 (mads68 - MADS- | DNA-binding transcription factor |
| | transcription factor 68; ZmM47) | activity |
| SEQ ID NO: 10 | GRMZM2G170365 (ZmSF2 - Zea mays | mRNA splicing |
| | splicing factor 2) | |
| SEQ ID NO: 11 | GRMZM2G086779 (ZmSFT-like - Zea mays | mRNA splicing |
| | mRNA splicing factor thioredoxin-like U5 | |
| | snRNP) | |
| SEQ ID NO: 12 | GRMZM2G160687 genomic (zag2 - Zea | DNA-binding transcription factor |
| | AGAMOUS homolog2) | activity |
| SEQ ID NO: 13 | GRMZM2G160565 genomic (bde1 - | DNA-binding transcription factor |
| | bearded-ear1; ZmMADS56) | activity |
| SEQ ID NO: 14 | GRMZM2G072582 genomic (mads3 - | DNA-binding transcription factor |
| | MADS3; ZmZAPL) | activity |
| SEQ ID NO: 15 | GRMZM2G099522 genomic (zmm14 - Zea | DNA-binding transcription factor |
| | mays MADS14; ZmM5) | activity |
| SEQ ID NO: 16 | GRMZM2G159397 genomic (zmm6 - Zea | DNA-binding transcription factor |
| | mays MADS6) | activity |
| SEQ ID NO: 17 | GRMZM2G097059 genomic (zmm7 - Zea | DNA-binding transcription factor |
| | mays MADS7) | activity |
| SEQ ID NO: 18 | GRMZM2G087095 genomic (zmm24 - Zea | DNA-binding transcription factor |
| | mays MADS24) | activity |
| SEQ ID NO: 19 | GRMZM5G814279 genomic (mads74 - | DNA-binding transcription factor |
| | MADS-transcription factor 74, | activity |
| | ZmMADS47-like) | |
| SEQ ID NO: 20 | GRMZM2G059102 genomic (mads68 - | DNA-binding transcription factor |
| | MADS-transcription factor 68; ZmM47) | activity |
| SEQ ID NO: 21 | GRMZM2G170365 genomic (ZmSF2 - Zea | mRNA splicing |
| | mays splicing factor 2) | |
| SEQ ID NO: 22 | GRMZM2G086779 genomic (ZmSFT-like - | mRNA splicing |
| | Zea mays mRNA splicing factor | |
| | thioredoxin-like U5 snRNP) | |
| Direct Targets | | |
| SEQ ID NO: 23 | GRMZM2G036880 (light-harvesting | integral component of thylakoid |
| | complex I chlorophyll a/b binding protein | membrane |
| | 1 (LHCA1) like) | |
| SEQ ID NO: 24 | GRMZM2G117412 (Chlorophyll a-b | photosynthesis |
| | binding protein) | |
| SEQ ID NO: 25 | GRMZM2G176840 (PSBP-like protein 1, | photosynthesis |
| | chloroplastic) | |
| SEQ ID NO: 26 | GRMZM2G149428 (Ihcb5 - light | photosynthesis |
| | harvesting chlorophyll a/b binding | |
| | protein5) | |
| SEQ ID NO: 27 | GRMZM2G112728 (all-trans-nonaprenyl- | photosynthesis |
| | diphosphate synthase) | |
| SEQ ID NO: 28 | GRMZM2G306345 (pdk1 - pyruvate, | photosynthesis |
| | orthophosphate dikinase1) | |
| SEQ ID NO: 29 | GRMZM2G306345 (pdk1 - pyruvate, | photosynthesis |
| | orthophosphate dikinase1) | |
| SEQ ID NO: 30 | GRMZM2G459166 (F-box protein GID2 | giberellin signaling |
| | (GID2, SLY1)) | |
| SEQ ID NO: 31 | GRMZM2G073427 (bzip111 - bZIP- | DNA-binding transcription factor |
| | transcription factor 111) | activity |
| SEQ ID NO: 32 | GRMZM2G036880 genomic (light- | integral component of thylakoid |
| | harvesting complex I chlorophyll a/b | membrane |
| | binding protein 1 (LHCA1) like) | |
| SEQ ID NO: 33 | GRMZM2G117412 genomic (Chlorophyll | photosynthesis |
| | a-b binding protein) | |
| SEQ ID NO: 34 | GRMZM2G176840 genomic (PSBP-like | photosynthesis |
| | protein 1, chloroplastic) | |
| SEQ ID NO: 35 | GRMZM2G149428 genomic (Ihcb5 - light | photosynthesis |
| | harvesting chlorophyll a/b binding | |
| | protein5) | |
| SEQ ID NO: 36 | GRMZM2G112728 genomic (all-trans- | photosynthesis |
| | nonaprenyl-diphosphate synthase) | |
| SEQ ID NO: 37 | GRMZM2G306345 genomic (pdk1 - | photosynthesis |
| | pyruvate, orthophosphate dikinase1) | |
| SEQ ID NO: 38 | GRMZM2G459166 genomic (F-box | giberellin signaling |
| | protein GID2 (GID2, SLY1)) | |
| SEQ ID NO: 39 | GRMZM2G073427 genomic (bzip111 - | DNA-binding transcription factor |
| | bZIP-transcription factor 111) | activity |

TABLE 1B
Sequence Listing Description- Differentially Expressed Genes

| Differentially Expressed Genes | | Functional Annotation |
|---|---|---|
| SEQ ID NO: 40 | Zm00001d022088 Protein Agamous-like | DNA-binding transcription factor |
| | MADS-box protein AGL8 | activity |
| SEQ ID NO: 41 | Zm00001d023455 Protein Transcription | DNA-binding transcription factor |
| | repressor OFP13 | activity |
| SEQ ID NO: 42 | Zm00001d023456 Protein Transcription | DNA-binding transcription factor |
| | repressor OFP6 | activity |
| SEQ ID NO: 43 | Zm00001d038273 Protein Coronatine- | shade avoidance |
| | insensitive protein 1 | |
| SEQ ID NO: 44 | Zm00001d004053 Protein hypothetical | None identified |
| | protein | |
| SEQ ID NO: 45 | Zm00001d029183 Protein cytochrome | isoflavone 2′-hydroxylase activity |
| | P450 family 81 subfamily D | |
| | polypeptide 8 | |
| SEQ ID NO: 46 | Zm00001d051194 Protein Arginine | arginine decarboxylase activity |
| | decarboxylase | |
| SEQ ID NO: 47 | Zm00001d033132 Protein photosystem II | photosynthesis |
| | light harvesting complex gene 2.1 | |
| SEQ ID NO: 48 | Zm00001d029215 Protein Villin-2 | actin filament bundle assembly |
| SEQ ID NO: 49 | Zm00001d033543 Protein Integral | cellular carbohydrate metabolic |
| | membrane HPP family protein | process |
| SEQ ID NO: 50 | Zm00001d053925 Protein hypothetical | chlorophyll biosynthetic process |
| | protein | |
| SEQ ID NO: 51 | Zm00001d028269 Protein hypothetical | DNA-binding transcription factor |
| | protein | activity |
| SEQ ID NO: 52 | Zm00001d033544 Protein | transferase activity, transferring |
| | Glycosyltransferase family protein 64 | hexosyl groups |
| | protein C5 | |
| SEQ ID NO: 53 | Zm00001d034015 Protein exoglucanasel | glucan exo-1,3-beta-glucosidase |
| | | activity |
| SEQ ID NO: 54 | Zm00001d027743 Protein | sugar mediated signaling pathway |
| | Serine/threonine-protein kinase EDR1 | |
| SEQ ID NO: 55 | Zm00001d048311 Protein Sucrose | sucrose transmembrane transporter |
| | transport protein SUC3 | activity |
| SEQ ID NO: 56 | Zm00001d047256 Protein Protein kinase | signal transduction |
| | domain superfamily protein | |
| SEQ ID NO: 57 | Zm00001d048720 Protein Glutaredoxin- | electron transport chain |
| | C13 | |
| SEQ ID NO: 58 | Zm00001d023426 Protein hypothetical | chlorophyll biosynthetic process |
| | protein | |
| SEQ ID NO: 59 | Zm00001d004331 Protein hypothetical | regulation of transcription, DNA- |
| | protein | templated |
| SEQ ID NO: 60 | Zm00001d050748 Protein proline-rich | ATPase activity, coupled to |
| | family protein | transmembrane movement of |
| | | substances |
| SEQ ID NO: 61 | Zm00001d010321 Protein pyruvate | pyruvate, phosphate dikinase |
| | orthophosphate dikinase2 | activity |
| SEQ ID NO: 62 | Zm00001d004894 Protein ribulose | ribulose-bisphosphate carboxylase |
| | bisphosphate carboxylase small subunit2 | activity |
| SEQ ID NO: 63 | Zm00001d042346 Protein alpha/beta- | haloalkane dehalogenase activity |
| | Hydrolases superfamily protein | |
| SEQ ID NO: 64 | Zm00001d031657 Protein putative | acid phosphatase activity |
| | inactive purple acid phosphatase 27 | |
| SEQ ID NO: 65 | Zm00001d008178 Protein ABC | basipetal auxin transport |
| | transporter B family member 21 | |
| SEQ ID NO: 66 | Zm00001d043044 Protein Sec1/munc18- | kinase activity |
| | like (SM) proteins superfamily | |
| SEQ ID NO: 67 | Zm00001d018623 Protein Photosynthetic | electron transporter, transferring |
| | NDH subunit of lumenal location 3 | electrons within the cyclic electron |
| | chloroplastic | transport pathway of |
| | | photosynthesis activity |
| SEQ ID NO: 68 | Zm00001d043095 Protein Zinc finger | chloroplast organization |
| | protein VAR3 chloroplastic | |
| SEQ ID NO: 69 | Zm00001d029062 Protein Vicilin-like | nutrient reservoir activity |
| | seed storage protein | |
| SEQ ID NO: 70 | Zm00001d011900 Protein RNA-binding | RNA binding |
| | protein BRN1 | |
| SEQ ID NO: 71 | Zm00001d010672 Protein Metacaspase | phosphoglycerate kinase activity |
| | type II | |
| SEQ ID NO: 72 | Zm00001d011183 Protein thiamine | thiazole biosynthetic process |
| | biosynthesis1 | |
| SEQ ID NO: 73 | Zm00001d037103 Protein Peroxiredoxin | peroxiredoxin activity |
| | Q chloroplastic | |
| SEQ ID NO: 74 | Zm00001d009028 Protein Triose | transporter activity |
| | phosphate/phosphate translocator, | |
| | chloroplastic | |
| SEQ ID NO: 75 | Zm00001d013937 Protein | chlorophyll biosynthetic process |
| | Protochlorophyllide reductase C | |
| | chloroplastic | |
| SEQ ID NO: 76 | Zm00001d002873 Protein UPF0426 | plastoglobule |
| | protein chloroplastic | |
| SEQ ID NO: 77 | Zm00001d037362 Protein DNA | DNA topoisomerase activity |
| | topoisomerase type IA core | |
| SEQ ID NO: 78 | Zm00001d026404 Protein hypothetical | arginine catabolic process to |
| | protein | glutamate |
| SEQ ID NO: 79 | Zm00001d047255 Protein 3-oxoacyl- | 3-oxoacyl-[acyl-carrier-protein] |
| | [acyl-carrier-protein] synthase II | synthase activity |
| | chloroplastic | |
| SEQ ID NO: 80 | Zm00001d031253 Protein dicarboxylic | transporter activity |
| | acid transporter2 | |
| SEQ ID NO: 81 | Zm00001d027576 Protein hypothetical | voltage-gated anion channel |
| | protein | activity |
| SEQ ID NO: 82 | Zm00001d052595 Protein Ribulose | ribulose-bisphosphate carboxylase |
| | bisphosphate carboxylase small chain, | activity |
| | chloroplastic | |
| SEQ ID NO: 83 | Zm00001d013367 Protein Tubulin alpha- | structural molecule activity |
| | 4 chain | |
| SEQ ID NO: 84 | Zm00001d046001 Protein Triose | transmembrane transporter activity |
| | phosphate/phosphate translocator TPT | |
| | chloroplastic | |
| SEQ ID NO: 85 | Zm00001d008963 Protein GDT1-like | chloroplast membrane |
| | protein 1 chloroplastic | |
| SEQ ID NO: 86 | Zm00001d048515 Protein Stress | gene silencing |
| | responsive alpha-beta barrel domain | |
| | protein | |
| SEQ ID NO: 87 | Zm00001d052595 Protein Ribulose | ribulose-bisphosphate carboxylase |
| | bisphosphate carboxylase small chain, | activity |
| | chloroplastic | |
| SEQ ID NO: 88 | Zm00001d042049 Protein Ferredoxin | photosynthetic electron transport |
| | | in photosystem I |
| SEQ ID NO: 89 | Zm00001d040242 Protein Nuclear | cellular macromolecule metabolic |
| | transport factor 2 (NTF2) family protein | process |
| SEQ ID NO: 90 | Zm00001d042697 Protein photosystem II | PSII associated light-harvesting |
| | subunit PsbS1 | complex II |
| SEQ ID NO: 91 | Zm00001d019518 Protein Photosystem I | photosystem I reaction center |
| | reaction center subunit IV A | |
| SEQ ID NO: 92 | Zm00001d048313 Protein NAD(P)-linked | photosystem II assembly |
| | oxidoreductase superfamily protein | |
| SEQ ID NO: 93 | Zm00001d033150 Protein hypothetical | transcription regulatory region |
| | protein | sequence-specific DNA binding |
| SEQ ID NO: 94 | Zm00001d007858 Protein Pyridoxal | oxidoreductase activity |
| | reductase chloroplastic | |
| SEQ ID NO: 95 | Zm00001d003588 Protein Ras-related | protein binding |
| | protein RABD1 | |
| SEQ ID NO: 96 | Zm00001d036903 Protein Plant Tudor- | RNA binding |
| | like RNA-binding protein | |
| SEQ ID NO: 97 | Zm00001d031484 Protein PsbP domain- | photosystem II oxygen evolving |
| | containing protein 3 chloroplastic | complex |
| SEQ ID NO: 98 | Zm00001d018157 Protein light harvesting | photosynthesis, light harvesting in |
| | complex a/b protein4 | photosystem I |
| SEQ ID NO: 99 | Zm00001d005814 Protein Photosystem I | photosynthesis, light harvesting in |
| | chlorophyll a/b-binding protein 6 | photosystem I |
| | chloroplastic | |
| SEQ ID NO: 100 | Zm00001d033338 Protein NAD(P)-linked | oxidoreductase activity |
| | oxidoreductase superfamily protein | |
| SEQ ID NO: 101 | Zm00001d053446 Protein potassium | voltage-gated potassium channel |
| | channel3 | activity |
| SEQ ID NO: 102 | Zm00001d026603 Protein Magnesium- | photosynthesis, light reaction |
| | chelatase subunit ChlH chloroplastic | |
| SEQ ID NO: 103 | Zm00001d027841 Protein Ribulose- | pentose-phosphate shunt, non- |
| | phosphate 3-epimerase | oxidative branch |
| SEQ ID NO: 104 | Zm00001d030048 Protein pfkB-like | isopentenyl diphosphate |
| | carbohydrate kinase family protein | biosynthetic process, |
| | | methylerythritol 4-phosphate |
| | | pathway |
| SEQ ID NO: 105 | Zm00001d005346 Protein Aldo-keto | oxidoreductase activity |
| | reductase/oxidoreductase | |
| SEQ ID NO: 106 | Zm00001d023706 Protein thioredoxin M1 | transcription coregulator activity |
| SEQ ID NO: 107 | Zm00001d042050 Protein Protein | chlorophyll biosynthetic process |
| | RETICULATA-RELATED 4 | |
| | chloroplastic | |
| SEQ ID NO: 108 | Zm00001d042533 Protein Trigger factor | protein transport |
| SEQ ID NO: 109 | Zm00001d022590 Protein hypothetical | transcription, DNA-templated |
| | protein | |
| SEQ ID NO: 110 | Zm00001d045431 Protein Enolase 1 | phosphopyruvate hydratase |
| | | activity |
| SEQ ID NO: 111 | Zm00001d047743 Protein fatty acid | oxidoreductase activity, acting on |
| | desaturase7 | paired donors, with oxidation of a |
| | | pair of donors resulting in the |
| | | reduction of molecular oxygen to |
| | | two molecules of water |
| SEQ ID NO: 112 | Zm00001d036738 Protein S-adenosyl-L- | methyltransferase activity |
| | methionine-dependent methyltransferase | |
| | superfamily protein | |
| SEQ ID NO: 113 | Zm00001d018274 Protein Isoleucine-- | valyl-tRNA aminoacylation |
| | tRNA ligase chloroplastic/mitochondrial | |
| SEQ ID NO: 114 | Zm00001d035003 Protein ferredoxin2 | electron transfer activity |
| SEQ ID NO: 115 | Zm00001d027321 Protein hypothetical | peptidyl-prolyl cis-trans isomerase |
| | protein | activity |
| SEQ ID NO: 116 | Zm00001d014284 Protein CMV 1a | methyltransferase activity |
| | interacting protein 1 | |
| SEQ ID NO: 117 | Zm00001d036340 Protein photosystem | photosystem II |
| | II1 | |
| SEQ ID NO: 118 | Zm00001d003767 Protein Photosystem I | photosynthesis, light harvesting in |
| | subunit O | photosystem I |
| SEQ ID NO: 119 | Zm00001d031997 Protein NAD(P)- | nucleotide binding |
| | binding Rossmann-fold superfamily | |
| | protein | |
| SEQ ID NO: 120 | Zm00001d019479 Protein granule-bound | NDP-glucose-starch |
| | starch synthase 1b | glucosyltransferase activity |
| SEQ ID NO: 121 | Zm00001d024148 Protein Photosynthetic | photosynthetic electron transport |
| | NDH subunit of subcomplex B 1 | in photosystem I |
| | chloroplastic | |
| SEQ ID NO: 122 | Zm00001d038579 Protein | photosynthesis, light reaction |
| | Phosphoglycerate kinase | |
| SEQ ID NO: 123 | Zm00001d037273 Protein Peptide | electron transport chain |
| | methionine sulfoxide reductase msrB | |
| SEQ ID NO: 124 | Zm00001d025845 Protein hypothetical | chloroplast thylakoid membrane |
| | protein | |
| SEQ ID NO: 125 | Zm00001d027422 Protein PsbP-like | chloroplast photosystem II |
| | protein 1 chloroplastic | |
| SEQ ID NO: 126 | Zm00001d024519 Protein rubredoxin | iron ion binding |
| | family protein | |
| SEQ ID NO: 127 | Zm00001d040163 Protein deoxy xylulose | 1-deoxy-D-xylulose-5-phosphate |
| | reductoisomerase1 | reductoisomerase activity |
| SEQ ID NO: 128 | Zm00001d012868 Protein carotene | oxidoreductase activity |
| | isomerase3 | |
| SEQ ID NO: 129 | Zm00001d021763 Protein photosystem II | photosynthesis, light harvesting in |
| | subunit29 | photosystem I |
| SEQ ID NO: 130 | Zm00001d035761 Protein Peptidyl-prolyl | peptidyl-prolyl cis-trans isomerase |
| | cis-trans isomerase | activity |
| SEQ ID NO: 131 | Zm00001d032301 Protein S-adenosyl-L- | methyltransferase activity |
| | methionine-dependent methyltransferase | |
| | superfamily protein | |
| SEQ ID NO: 132 | Zm00001d028562 Protein Fructose-1,6- | photosynthetic electron transport |
| | bisphosphatase | in photosystem I |
| SEQ ID NO: 133 | Zm00001d034538 Protein Rubredoxin- | iron ion binding |
| | like superfamily protein | |
| SEQ ID NO: 134 | Zm00001d048116 Protein hypothetical | isopentenyl diphosphate |
| | protein | biosynthetic process, |
| | | methylerythritol 4-phosphate |
| | | pathway |
| SEQ ID NO: 135 | Zm00001d048998 Protein Chlorophyll a- | photosynthesis |
| | b binding protein CP26 chloroplastic | |
| SEQ ID NO: 136 | Zm00001d049490 Protein Protein | translation initiation factor activity |
| | CHLORORESPIRATORY REDUCTION | |
| | 6 chloroplastic | |
| SEQ ID NO: 137 | Zm00001d015975 Protein putative | lactoylglutathione lyase activity |
| | lactoylglutathione lyase chloroplastic | |
| SEQ ID NO: 138 | Zm00001d015613 Protein Protein TIC 21 | protein import into chloroplast |
| | chloroplastic | stroma |
| SEQ ID NO: 139 | Zm00001d039258 Protein Triose | glucose-6-phosphate |
| | phosphate/phosphate translocator TPT | transmembrane transporter activity |
| | chloroplastic | |
| SEQ ID NO: 140 | Zm00001d007267 Protein light harvesting | photosynthesis, light harvesting in |
| | chlorophyll a/b binding protein5 | photosystem I |
| SEQ ID NO: 141 | Zm00001d033383 Protein | thiamine biosynthetic process |
| | hydroxymethylpyrimidine phosphate | |
| | synthase1 | |
| SEQ ID NO: 142 | Zm00001d026645 Protein K(+) efflux | solute: proton antiporter activity |
| | antiporter 2 chloroplastic | |
| SEQ ID NO: 143 | Zm00001d023757 Protein NAD(P)H- | heat shock protein binding |
| | quinone oxidoreductase subunit U | |
| | chloroplastic | |
| SEQ ID NO: 144 | Zm00001d034005 Protein evolutionarily | oxidation-reduction process |
| | conserved C-terminal region 2 | |
| SEQ ID NO: 145 | Zm00001d022381 Protein NADPH- | hydrogen peroxide catabolic |
| | dependent thioredoxin reductase 3 | process |
| SEQ ID NO: 146 | Zm00001d031962 Protein hypothetical | protein dephosphorylation |
| | protein | |
| SEQ ID NO: 147 | Zm00001d005446 Protein Photosystem I | photosystem I reaction center |
| | reaction center subunit IV A | |
| SEQ ID NO: 148 | Zm00001d027511 Protein Catalase | hydrogen peroxide catabolic |
| | isozyme 2 | process |
| SEQ ID NO: 149 | Zm00001d017178 Protein hypothetical | primary metabolic process |
| | protein | |
| SEQ ID NO: 150 | Zm00001d038947 Protein putative | electron transfer activity |
| | galacturonosyltransferase-like 9 | |
| SEQ ID NO: 151 | Zm00001d034739 Protein | acetylpyruvate hydrolase activity |
| | Fumarylacetoacetate (FAA) hydrolase | |
| | family | |
| SEQ ID NO: 152 | Zm00001d044745 Protein Alanine--tRNA | alanyl-tRNA aminoacylation |
| | ligase chloroplastic/mitochondrial | |
| SEQ ID NO: 153 | Zm00001d038491 Protein | N-acetyltransferase activity |
| | Acetyltransferase NSI | |
| SEQ ID NO: 154 | Zm00001d014445 Protein Protein kinase | kinase activity |
| | superfamily protein | |
| SEQ ID NO: 155 | Zm00001d039745 Protein Protein | phosphoprotein phosphatase |
| | phosphatase 2C | activity |
| SEQ ID NO: 156 | Zm00001d038485 Protein | photosystem II stabilization |
| | Serine/threonine-protein kinase STN8 | |
| | chloroplastic | |
| SEQ ID NO: 157 | Zm00001d012287 Protein hypothetical | starch biosynthetic process |
| | protein | |
| SEQ ID NO: 158 | Zm00001d027694 Protein Solanesyl | plastoquinone biosynthetic process |
| | diphosphate synthase 2 chloroplastic | |
| SEQ ID NO: 159 | Zm00001d003470 Protein putative | response to abscisic acid |
| | plastid-lipid-associated protein 2 | |
| | chloroplastic | |
| SEQ ID NO: 160 | Zm00001d019180 Protein Nudix | hydrolase activity |
| | hydrolase 16 mitochondrial | |
| SEQ ID NO: 161 | Zm00001d007394 Protein Rubredoxin- | iron ion binding |
| | like superfamily protein | |
| SEQ ID NO: 162 | Zm00001d053432 Protein iron-sulfur | electron transporter, transferring |
| | protein2 | electrons within cytochrome b6/f |
| | | complex of photosystem II activity |
| SEQ ID NO: 163 | Zm00001d039900 Protein putative zinc | metalloendopeptidase activity |
| | metalloprotease EGY2 chloroplastic | |
| SEQ ID NO: 164 | Zm00001d050810 Protein 2-hydroxy-3- | pentose-phosphate shunt |
| | oxopropionate reductase | |
| SEQ ID NO: 165 | Zm00001d016802 Protein L-ascorbate | L-ascorbate peroxidase activity |
| | peroxidase S chloroplastic/mitochondrial | |
| SEQ ID NO: 166 | Zm00001d004978 Protein Saccharopine | oxidoreductase activity |
| | dehydrogenase | |
| SEQ ID NO: 167 | Zm00001d028924 Protein NifU-like | iron-sulfur cluster assembly |
| | protein 1 chloroplastic | |
| SEQ ID NO: 168 | Zm00001d002815 Protein NAD(P)H- | oxidoreductase activity, acting on |
| | quinone oxidoreductase subunit M | NAD(P)H, quinone or similar |
| | chloroplastic | compound as acceptor |
| SEQ ID NO: 169 | Zm00001d029065 Protein Protein LRP16 | regulation of transcription, DNA- |
| | | templated |
| SEQ ID NO: 170 | Zm00001d052184 Protein Protein | chloroplast envelope |
| | CURVATURE THYLAKOID ID | |
| | chloroplastic | |
| SEQ ID NO: 171 | Zm00001d038337 Protein DAR GTPase 3 | GTP binding |
| | chloroplastic | |
| SEQ ID NO: 172 | Zm00001d003713 Protein Exocyst | pollen tube growth |
| | complex component SEC5A | |
| SEQ ID NO: 173 | Zm00001d031953 Protein Thioredoxin | protein disulfide oxidoreductase |
| | family protein | activity |
| SEQ ID NO: 174 | Zm00001d053576 Protein putative | eukaryotic translation elongation |
| | elongation factor 1-gamma 2 | factor 1 complex |
| SEQ ID NO: 175 | Zm00001d000123 Protein NAD(P)- | response to oxidative stress |
| | binding Rossmann-fold superfamily | |
| | protein | |
| SEQ ID NO: 176 | Zm00001d045431 Protein Enolase 1 | phosphopyruvate hydratase |
| | | activity |
| SEQ ID NO: 177 | Zm00001d036630 Protein Filamentation | metalloendopeptidase activity |
| | temperature-sensitive H 2B | |
| SEQ ID NO: 178 | Zm00001d048515 Protein Stress | gene silencing |
| | responsive alpha-beta barrel domain | |
| | protein | |
| SEQ ID NO: 179 | Zm00001d021310 Protein | reductive pentose-phosphate cycle |
| | Triosephosphate isomerase | |
| SEQ ID NO: 180 | Zm00001d042353 Protein sucrose | sucrose synthase activity |
| | phosphate synthase2 | |
| SEQ ID NO: 181 | Zm00001d050150 Protein Adenylate | adenylate kinase activity |
| | kinase 5 chloroplastic | |
| SEQ ID NO: 182 | Zm00001d025545 Protein zeaxanthin | abscisic acid biosynthetic process |
| | epoxidase2 | |
| SEQ ID NO: 183 | Zm00001d012168 Protein Membrane- | chloroplast thylakoid membrane |
| | associated protein VIPP1 chloroplastic | |
| SEQ ID NO: 184 | Zm00001d011581 Protein Peroxiredoxin- | peroxiredoxin activity |
| | 2B | |
| SEQ ID NO: 185 | Zm00001d018030 Protein Photosynthetic | regulation of transcription by RNA |
| | NDH subunit of subcomplex B 4 | polymerase II |
| | chloroplastic | |
| SEQ ID NO: 186 | Zm00001d018145 Protein Presequence | protein processing |
| | protease 2 chloroplastic/mitochondrial | |
| SEQ ID NO: 187 | Zm00001d040221 Protein Peptidase | metalloendopeptidase activity |
| | family M48 family protein | |
| SEQ ID NO: 188 | Zm00001d033594 Protein Myelin- | phosphorus metabolic process |
| | associated oligodendrocyte basic protein | |
| | isoform 1 | |
| SEQ ID NO: 189 | Zm00001d008625 Protein Inner | thylakoid membrane organization |
| | membrane protein ALBINO3 | |
| | chloroplastic | |
| SEQ ID NO: 190 | Zm00001d032380 Protein acclimation of | photosystem II assembly |
| | photosynthesis to environment | |
| SEQ ID NO: 191 | Zm00001d045575 Protein Ferredoxin- | photosynthetic electron transport |
| | NADP reductase leaf isozyme 1 | in photosystem I |
| | chloroplastic | |
| SEQ ID NO: 192 | Zm00001d042526 Protein | regulation of stomatai closure |
| | Rhodanese/Cell cycle control phosphatase | |
| | superfamily protein | |
| SEQ ID NO: 193 | Zm00001d043168 Protein MAR-binding | photosystem II assembly |
| | filament-like protein 1-1 isoform 2 | |
| SEQ ID NO: 194 | Zm00001d053545 Protein NAD(P)- | nucleotide binding |
| | binding Rossmann-fold superfamily | |
| | protein | |
| SEQ ID NO: 195 | Zm00001d053981 Protein putative | pyridoxal phosphate biosynthetic |
| | pyridoxal 5′-phosphate synthase subunit | process |
| | PDX2 | |
| SEQ ID NO: 196 | Zm00001d017746 Protein vitamin E | tocopherol O-methyltransferase |
| | synthesis4 | activity |
| SEQ ID NO: 197 | Zm00001d012083 Protein Thioredoxin F- | pentose-phosphate shunt |
| | type chloroplastic | |
| SEQ ID NO: 198 | Zm00001d024718 Protein Beta-carotene | strigolactone biosynthetic process |
| | isomerase D27 chloroplastic | |
| SEQ ID NO: 199 | Zm00001d021621 Protein | 3′-5′ exonuclease activity |
| | Polynucleotidyl transferase ribonuclease | |
| | H fold protein with HRDC domain | |
| SEQ ID NO: 200 | Zm00001d015004 Protein Protein LOW | aromatic amino acid family |
| | PSII ACCUMULATION 3 chloroplastic | biosynthetic process |
| SEQ ID NO: 201 | Zm00001d039131 Protein ADP glucose | glucose-1-phosphate |
| | pyrophosphorylase2 | adenylyltransferase activity |
| SEQ ID NO: 202 | Zm00001d044970 Protein putative | protein tyrosine phosphatase |
| | tyrosine-protein phosphatase | activity |
| SEQ ID NO: 203 | Zm00001d018401 Protein plastid | positive regulation of ubiquitin |
| | transcriptionally active 17 | protein ligase activity |
| SEQ ID NO: 204 | Zm00001d015975 Protein putative | lactoylglutathione lyase activity |
| | lactoylglutathione lyase chloroplastic | |
| SEQ ID NO: 205 | Zm00001d013428 Protein | phosphoglucomutase activity |
| | phosphoglucomutase2 | |
| SEQ ID NO: 206 | Zm00001d021246 Protein Ras-related | chloroplast thylakoid membrane |
| | protein RABA3 | |
| SEQ ID NO: 207 | Zm00001d007921 Protein Tic62 protein | oxidation-reduction process |
| SEQ ID NO: 208 | Zm00001d027511 Protein Catalase | hydrogen peroxide catabolic |
| | isozyme 2 | process |
| SEQ ID NO: 209 | Zm00001d027309 Protein Phosphoglucan | intracellular signal transduction |
| | phosphatase DSP4 chloroplastic | |
| SEQ ID NO: 210 | Zm00001d025544 Protein Zeaxanthin | zeaxanthin epoxidase [overall] |
| | epoxidase chloroplastic | activity |
| SEQ ID NO: 211 | Zm00001d039276 Protein Ubiquitin | cellular metabolic process |
| | ligase SINAT3 | |
| SEQ ID NO: 212 | Zm00001d003512 Protein Zeaxanthin | zeaxanthin epoxidase [overall] |
| | epoxidase chloroplastic | activity |
| SEQ ID NO: 213 | Zm00001d053861 Protein Putative | GTP binding |
| | translation elongation factor family | |
| | protein | |
| SEQ ID NO: 214 | Zm00001d038894 Protein | circadian rhythm |
| | Serine/threonine-protein kinase STN7 | |
| | chloroplastic | |
| SEQ ID NO: 215 | Zm00001d051321 Protein ATP- | metalloendopeptidase activity |
| | dependent zinc metalloprotease FTSH 7 | |
| | chloroplastic | |
| SEQ ID NO: 216 | Zm00001d016826 Protein proline-rich | anatomical structure |
| | family protein | morphogenesis |
| SEQ ID NO: 217 | Zm00001d016854 Protein Ferrochelatase | starch biosynthetic process |
| SEQ ID NO: 218 | Zm00001d017435 Protein hypothetical | none |
| | protein | |
| SEQ ID NO: 219 | Zm00001d048373 Protein Carotenoid | oxidoreductase activity, acting on |
| | 910(9′10′)-cleavage dioxygenase 1 | single donors with incorporation of |
| | | molecular oxygen, incorporation |
| | | of two atoms of oxygen |
| SEQ ID NO: 220 | Zm00001d018901 Protein protein | protein binding |
| | containing PDZ domain a K-box domain | |
| | and a TPR region | |
| SEQ ID NO: 221 | Zm00001d019454 Protein PGR5-like | photosynthetic electron transport |
| | protein 1B chloroplastic | in photosystem I |
| SEQ ID NO: 222 | Zm00001d031899 Protein malate | malate dehydrogenase (NADP+) |
| | dehydrogenase6 | activity |
| SEQ ID NO: 223 | Zm00001d045706 Protein Restorer of | aldehyde dehydrogenase (NAD) |
| | fertility2 | activity |
| SEQ ID NO: 224 | Zm00001d035869 Protein Protein MEI2- | nucleotide binding |
| | like 5 | |
| SEQ ID NO: 225 | Zm00001d053262 Protein calcium- | protein localization |
| | dependent lipid-binding family protein | |
| SEQ ID NO: 226 | Zm00001d017958 Protein Glutamine | glutamine biosynthetic process |
| | synthetase root isozyme 3 | |
| SEQ ID NO: 227 | Zm00001d007113 Protein Xylose | xylose isomerase activity |
| | isomerase | |
| SEQ ID NO: 228 | Zm00001d051650 Protein Sucrose | transcription, DNA-templated |
| | cleavage protein-like protein | |
| SEQ ID NO: 229 | Zm00001d015138 Protein hypothetical | nuclear pore |
| | protein | |
| SEQ ID NO: 230 | Zm00001d030103 Protein putative | xyloglucan: xyloglucosyl |
| | xyloglucan endotransglucosylase/ | transferase activity |
| | hydrolase protein 30 | |
| SEQ ID NO: 231 | Zm00001d021846 Protein Insulin- | metalloendopeptidase activity |
| | degrading enzyme-like 1 peroxisomal | |
| SEQ ID NO: 232 | Zm00001d041576 Protein Transcription | regulation of transcription, DNA- |
| | factor MYB48 | templated |
| SEQ ID NO: 233 | Zm00001d005391 Protein Cysteine | cysteine-type endopeptidase |
| | proteinases superfamily protein | activity |
| SEQ ID NO: 234 | Zm00001d009022 Protein NmrA-like | 166 nucleotide binding |
| | negative transcriptional regulator family | |
| | protein | |
| SEQ ID NO: 235 | Zm00001d041343 Protein putative | defense response |
| | disease resistance protein | |
| SEQ ID NO: 236 | Zm00001d039965 Protein Delta(7)-sterol- | fatty acid biosynthetic process |
| | C5(6)-desaturase 1 | |
| SEQ ID NO: 237 | Zm00001d029047 Protein Receptor-like | signaling receptor activity |
| | protein kinase FERONIA | |
| SEQ ID NO: 238 | Zm00001d028230 Protein Sugar transport | sucrose transport |
| | protein 13 | |
| SEQ ID NO: 239 | Zm00001d013243 Protein Cyclic | plant-type hypersensitive response |
| | nucleotide-gated ion channel 2 | |
| SEQ ID NO: 240 | Zm00001d032926 Protein | chlorophyll catabolic process |
| | chlorophyllase2 | |
| SEQ ID NO: 241 | Zm00001d045667 Protein Protein NRT1/ | nitrate assimilation |
| | PTR FAMILY 3.1 | |
| SEQ ID NO: 242 | Zm00001d021846 Protein Insulin- | metalloendopeptidase activity |
| | degrading enzyme-like 1 peroxisomal | |
| SEQ ID NO: 243 | Zm00001d033469 Protein Ferredoxin | electron transfer activity |
| SEQ ID NO: 244 | Zm00001d019563 Protein Aquaporin | transporter activity |
| | PIP2-1 | |
| SEQ ID NO: 245 | Zm00001d003866 Protein hypothetical | cell wall organization |
| | protein | |
| SEQ ID NO: 246 | Zm00001d039325 Protein Putative | signaling receptor activity |
| | inactive receptor-like protein kinase | |
| SEQ ID NO: 247 | Zm00001d023516 Protein Salt stress- | mannose binding |
| | induced protein | |
| SEQ ID NO: 248 | Zm00001d050918 Protein hypothetical | aldehyde dehydrogenase (NAD) |
| | protein | activity |
| SEQ ID NO: 249 | Zm00001d025253 Protein hypothetical | none |
| | protein | |
| SEQ ID NO: 250 | Zm00001d024499 Protein Nuclear factor | aminoacyl-tRNA hydrolase |
| | 1 A-type isoform 2 | activity |
| SEQ ID NO: 251 | Zm00001d045948 Protein Protein | drug transmembrane transporter |
| | DETOXIFICATION 16 | activity |
| SEQ ID NO: 252 | Zm00001d021569 Protein Transparent | drug transmembrane transporter |
| | testa 12 protein | activity |
| SEQ ID NO: 253 | Zm00001d053327 Protein Galactoside 2- | xyloglucan biosynthetic process |
| | alpha-L-fucosyltransferase | |
| SEQ ID NO: 254 | Zm00001d047208 Protein WAT1-related | auxin-activated signaling pathway |
| | protein | |
| SEQ ID NO: 255 | Zm00001d007687 Protein Tropinone | response to karrikin |
| | reductase-like protein | |
| SEQ ID NO: 256 | Zm00001d015126 Protein response to low | pyridoxamine-phosphate oxidase |
| | sulfur 3 | activity |
| SEQ ID NO: 257 | Zm00001d034781 Protein G-type lectin | multicellular organism |
| | S-receptor-like serine/threonine-protein | development |
| | kinase | |
| SEQ ID NO: 258 | Zm00001d016655 Protein hypothetical | voltage-gated potassium channel |
| | protein | activity |
| SEQ ID NO: 259 | Zm00001d043517 Protein Peptidase M28 | regulation of inflorescence |
| | family protein | meristem growth |
| SEQ ID NO: 260 | Zm00001d045667 Protein Protein NRT1/ | nitrate assimilation |
| | PTR FAMILY 3.1 | |
| SEQ ID NO: 261 | Zm00001d000126 Function unknown | voltage-gated potassium channel |
| | | activity |
| SEQ ID NO: 262 | Zm00001d029706 Glutathione S- | glutathione transferase activity |
| | transferase GSTU6-like protein | |
| SEQ ID NO: 263 | Zm00001d029321 Cationic amino acid | amino acid transmembrane |
| | transporter | transporter activity |
| SEQ ID NO: 264 | Zm00001d014701 Transcription regulator | regulation of transcription, DNA- |
| | HTH, Myb-type, DNA-binding protein | templated |
| SEQ ID NO: 265 | Zm00001d049624 Glutamate-rich WD | zinc ion transmembrane transport |
| | repeat-containing protein 1-like protein | |
| SEQ ID NO: 266 | Zm00001d034359 Zinc finger, C2H2- | nucleic acid binding |
| | type/integrase, DNA-binding protein | |
| SEQ ID NO: 267 | Zm00001d033924 Cell wall protein | proton-transporting ATP synthase |
| | pherophorin-C10 (PHC10) | activity, rotational mechanism |
| SEQ ID NO: 268 | Zm00001d032222 UDP- | glucuronosyltransferase activity |
| | glycosyltransferase 85A2-like protein | |
| SEQ ID NO: 269 | Zm00001d018155 Galactoside 2-alpha-L- | cell wall biogenesis |
| | fucosyltransferase-like protein | |
| SEQ ID NO: 270 | Zm00001d036263 Receptor protein | protein serine/threonine kinase |
| | serine/threonine kinase | activity |
| SEQ ID NO: 271 | Zm00001d044043 Acetylajmaline | lipid catabolic process |
| | esterase | |
| SEQ ID NO: 272 | Zm00001d027425 MADS-box | transcription, DNA-templated |
| | transcription factor 56-like protein | |
| SEQ ID NO: 273 | Zm00001d048635 Putative disease | plant-type hypersensitive response |
| | resistance RPP13-like protein 3-like | |
| | protein | |
| SEQ ID NO: 274 | Zm00001d006795 Omega- | transferase activity, transferring |
| | hydroxypalmitate O-feruloyl transferase | acyl groups other than amino-acyl |
| | | groups |
| SEQ ID NO: 275 | Zm00001d041972 Cellulose synthase-like | ellulose biosynthetic process |
| | protein G2-like protein | |
| SEQ ID NO: 276 | Zm00001d000183 Hexose carrier protein | carbohydrate transport |
| | HEX6-like sugar transport protein | |
| SEQ ID NO: 277 | Zm00001d039575 1-aminocyclopropane- | oxidoreductase activity, acting on |
| | 1-carboxylate oxidase | paired donors, with incorporation |
| | | or reduction of molecular oxygen, |
| | | 2-oxoglutarate as one donor, and |
| | | incorporation of one atom each of |
| | | oxygen into both donors |
| SEQ ID NO: 278 | Zm00001d046202 Transposase, | sequence-specific DNA binding |
| | Ptta/En/Spm, plant | |
| SEQ ID NO: 279 | Zm00001d013571 Ubiquitin-protein | protein binding |
| | ligase/zinc ion binding protein | |
| SEQ ID NO: 280 | Zm00001d015470 GDU1 | multicellular organism |
| | | development |
| SEQ ID NO: 281 | Zm00001d053965 16.9 kDa class I heat | response to stress |
| | shock protein 1 | |
| SEQ ID NO: 282 | Zm00001d029164 Inactive beta-amylase | ellular polysaccharide catabolic |
| | 9-like protein | process |
| SEQ ID NO: 283 | Zm00001d031717 Transcription factor | transcription, DNA-templated |
| | MYC4-like protein | |
| SEQ ID NO: 284 | Zm00001d035767 Jasmonate O- | jasmonic acid metabolic process |
| | methyltransferase | |
| SEQ ID NO: 285 | Zm00001d004279 Myrcene synthase, | monoterpenoid biosynthetic |
| | chloroplastic-like protein | process |
| SEQ ID NO: 286 | Zm00001d003462 Lipoyl synthase 2, | lipoate synthase activity |
| | mitochondrial-like protein | |
| SEQ ID NO: 287 | Zm00001d026360 Cyclin PHO80-like | protein kinase binding |
| | protein | |
| SEQ ID NO: 288 | Zm00001d013984 Protein EXECUTER 1 | 3′-5′-exoribonuclease activity |
| | (EXI) | |
| SEQ ID NO: 289 | Zm00001d047207 Copper-transporting | calcium-transporting ATPase |
| | ATPase (CTATP) | activity |
| SEQ ID NO: 290 | Zm00001d030381 Deoxyribodipyrimidine | protein-chromophore linkage |
| | photo-lyase; Photoreactivating enzyme | |
| | CPD photolyase | |
| SEQ ID NO: 291 | Zm00001d046755 Two-component | phosphorelay response regulator |
| | response regulator ARR12-like protein | activity |
| SEQ ID NO: 292 | Zm00001d007167 CBL-interacting | peptidyl-serine phosphorylation |
| | protein kinase 07 | |
| SEQ ID NO: 293 | Zm00001d039392 High affinity cationic | L-alpha-amino acid |
| | amino acid transporter | transmembrane transport |
| SEQ ID NO: 294 | Zm00001d013627 Retinoblastoma- | chromatin silencing by small RNA |
| | binding protein | |
| SEQ ID NO: 295 | Zm00001d044717 Cyclic nucleotide | ion gated channel activity |
| | binding/inward rectifier potassium | |
| | channel | |
| SEQ ID NO: 296 | Zm00001d032933 KIP1-like protein | N-acetyltransferase activity |
| SEQ ID NO: 297 | Zm00001d034467 Transcription regulator | cell differentiation |
| | HTH, Myb-type, DNA-binding protein | |
| SEQ ID NO: 298 | Zm00001d018797 Photosystem I reaction | photosynthesis |
| | center subunit psaK, chloroplast precursor | |
| SEQ ID NO: 299 | Zm00001d002934 Secondary wall NAC | sequence-specific DNA binding |
| | transcription factor 4 | |
| SEQ ID NO: 300 | Zm00001d022088 cDNA Agamous-like | DNA-binding transcription factor |
| | MADS-box protein AGL8 | activity |
| SEQ ID NO: 301 | Zm00001d023455 cDNA Transcription | DNA-binding transcription factor |
| | repressor OFP13 | activity |
| SEQ ID NO: 302 | Zm00001d023456 cDNA Transcription | DNA-binding transcription factor |
| | repressor OFP6 | activity |
| SEQ ID NO: 303 | Zm00001d038273 cDNA Coronatine- | shade avoidance |
| | insensitive protein 1 | |
| SEQ ID NO: 304 | Zm00001d004053 cDNA hypothetical | none |
| | protein | |
| SEQ ID NO: 305 | Zm00001d029183 cDNA cytochrome | isoflavone 2′-hydroxylase activity |
| | P450 family 81 subfamily D | |
| | polypeptide 8 | |
| SEQ ID NO: 306 | Zm00001d051194 cDNA Arginine | arginine decarboxylase activity |
| | decarboxylase | |
| SEQ ID NO: 307 | Zm00001d033132 cDNA photosystem II | photosynthesis |
| | light harvesting complex gene 2.1 | |
| SEQ ID NO: 308 | Zm00001d029215 cDNA Villin-2 | actin filament bundle assembly |
| SEQ ID NO: 309 | Zm00001d033543 cDNA Integral | cellular carbohydrate metabolic |
| | membrane HPP family protein | process |
| SEQ ID NO: 310 | Zm00001d053925 cDNA hypothetical | chlorophyll biosynthetic process |
| | protein | |
| SEQ ID NO: 311 | Zm00001d028269 cDNA hypothetical | DNA-binding transcription factor |
| | protein | activity |
| SEQ ID NO: 312 | Zm00001d033544 cDNA | transferase activity, transferring |
| | Glycosyltransferase family protein 64 | hexosyl groups |
| | protein C5 | |
| SEQ ID NO: 313 | Zm00001d034015 cDNA exoglucanase1 | glucan exo-1,3-beta-glucosidase |
| | | activity |
| SEQ ID NO: 314 | Zm00001d027743 cDNA | sugar mediated signaling pathway |
| | Serine/threonine-protein kinase EDR1 | |
| SEQ ID NO: 315 | Zm00001d048311 cDNA Sucrose | sucrose transmembrane transporter |
| | transport protein SUC3 | activity |
| SEQ ID NO: 316 | Zm00001d047256 cDNA Protein kinase | signal transduction |
| | domain superfamily protein | |
| SEQ ID NO: 317 | Zm00001d048720 cDNA Glutaredoxin- | electron transport chain |
| | C13 | |
| SEQ ID NO: 318 | Zm00001d023426 cDNA hypothetical | chlorophyll biosynthetic process |
| | protein | |
| SEQ ID NO: 319 | Zm00001d004331 cDNA hypothetical | regulation of transcription, DNA- |
| | protein | templated |
| SEQ ID NO: 320 | Zm00001d050748 cDNA proline-rich | ATPase activity, coupled to |
| | family protein | transmembrane movement of |
| | | substances |
| SEQ ID NO: 321 | Zm00001d010321 cDNA pyruvate | pyruvate, phosphate dikinase |
| | orthophosphate dikinase2 | activity |
| SEQ ID NO: 322 | Zm00001d004894 cDNA ribulose | ribulose-bisphosphate carboxylase |
| | bisphosphate carboxylase small subunit2 | activity |
| SEQ ID NO: 323 | Zm00001d042346 cDNA alpha/beta- | haloalkane dehalogenase activity |
| | Hydrolases superfamily protein | |
| SEQ ID NO: 324 | Zm00001d031657 cDNA putative | acid phosphatase activity |
| | inactive purple acid phosphatase 27 | |
| SEQ ID NO: 325 | Zm00001d008178 cDNA ABC | basipetal auxin transport |
| | transporter B family member 21 | |
| SEQ ID NO: 326 | Zm00001d043044 cDNA Secl/munc18- | kinase activity |
| | like (SM) proteins superfamily | |
| SEQ ID NO: 327 | Zm00001d018623 cDNA Photosynthetic | electron transporter, transferring |
| | NDH subunit of lumenal location 3 | electrons within the cyclic electron |
| | chloroplastic | transport pathway of |
| | | photosynthesis activity |
| SEQ ID NO: 328 | Zm00001d043095 cDNA Zinc finger | chloroplast organization |
| | protein VAR3 chloroplastic | |
| SEQ ID NO: 329 | Zm00001d029062 cDNA Vicilin-like | nutrient reservoir activity |
| | seed storage protein | |
| SEQ ID NO: 330 | Zm00001d011900 cDNA RNA-binding | RNA binding |
| | protein BRN1 | |
| SEQ ID NO: 331 | Zm00001d010672 cDNA Metacaspase | phosphoglycerate kinase activity |
| | type II | |
| SEQ ID NO: 332 | Zm00001d011183 cDNA thiamine | thiazole biosynthetic process |
| | biosynthesis1 | |
| SEQ ID NO: 333 | Zm00001d037103 cDNA Peroxiredoxin | peroxiredoxin activity |
| | Q chloroplastic | |
| SEQ ID NO: 334 | Zm00001d009028 cDNA Triose | transporter activity |
| | phosphate/phosphate translocator, | |
| | chloroplastic | |
| SEQ ID NO: 335 | Zm00001d013937 cDNA | chlorophyll biosynthetic process |
| | Protochlorophyllide reductase C | |
| | chloroplastic | |
| SEQ ID NO: 336 | Zm00001d002873 cDNA UPF0426 | plastoglobule |
| | protein chloroplastic | |
| SEQ ID NO: 337 | Zm00001d037362 cDNA DNA | DNA topoisomerase activity |
| | topoisomerase type IA core | |
| SEQ ID NO: 338 | Zm00001d026404 cDNA hypothetical | arginine catabolic process to |
| | protein | glutamate |
| SEQ ID NO: 339 | Zm00001d047255 cDNA 3-oxoacyl- | 3-oxoacyl-[acyl-carrier-protein] |
| | [acyl-carrier-protein] synthase II | synthase activity |
| | chloroplastic | |
| SEQ ID NO: 340 | Zm00001d031253 cDNA dicarboxylic | transporter activity |
| | acid transported | |
| SEQ ID NO: 341 | Zm00001d027576 cDNA hypothetical | voltage-gated anion channel |
| | protein | activity |
| SEQ ID NO: 342 | Zm00001d052595 cDNA Ribulose | ribulose-bisphosphate carboxylase |
| | bisphosphate carboxylase small chain, | activity |
| | chloroplastic | |
| SEQ ID NO: 343 | Zm00001d013367 cDNA Tubulin alpha-4 | structural molecule activity |
| | chain | |
| SEQ ID NO: 344 | Zm00001d046001 cDNA Triose | transmembrane transporter activity |
| | phosphate/phosphate translocator TPT | |
| | chloroplastic | |
| SEQ ID NO: 345 | Zm00001d008963 cDNA GDT1-like | chloroplast membrane |
| | protein 1 chloroplastic | |
| SEQ ID NO: 346 | Zm00001d048515 cDNA Stress | gene silencing |
| | responsive alpha-beta barrel domain | |
| | protein | |
| SEQ ID NO: 347 | Zm00001d018779 cDNA hypothetical | none |
| | protein | |
| SEQ ID NO: 348 | Zm00001d052595 cDNA Ribulose | ribulose-bisphosphate carboxylase |
| | bisphosphate carboxylase small chain, | activity |
| | chloroplastic | |
| SEQ ID NO: 349 | Zm00001d042049 cDNA Ferredoxin | photosynthetic electron transport |
| | | in photosystem I |
| SEQ ID NO: 350 | Zm00001d040242 cDNA Nuclear | cellular macromolecule metabolic |
| | transport factor 2 (NTF2) family protein | process |
| SEQ ID NO: 351 | Zm00001d042697 cDNA photosystem II | PSII associated light-harvesting |
| | subunit PsbS1 | complex II |
| SEQ ID NO: 352 | Zm00001d019518 cDNA Photosystem I | photosystem I reaction center |
| | reaction center subunit IV A | |
| SEQ ID NO: 353 | Zm00001d048313 cDNA NAD(P)-linked | photosystem II assembly |
| | oxidoreductase superfamily protein | |
| SEQ ID NO: 354 | Zm00001d033150 cDNA hypothetical | transcription regulatory region |
| | protein | sequence-specific DNA binding |
| SEQ ID NO: 355 | Zm00001d007858 cDNA Pyridoxal | oxidoreductase activity |
| | reductase chloroplastic | |
| SEQ ID NO: 356 | Zm00001d003588 cDNA Ras-related | protein binding |
| | protein RABD1 | |
| SEQ ID NO: 357 | Zm00001d036903 cDNA Plant Tudor-like | RNA binding |
| | RNA-binding protein | |
| SEQ ID NO: 358 | Zm00001d031484 cDNA PsbP domain- | photosystem II oxygen evolving |
| | containing protein 3 chloroplastic | complex |
| SEQ ID NO: 359 | Zm00001d018157 cDNA light harvesting | photosynthesis, light harvesting in |
| | complex a/b protein4 | photosystem I |
| SEQ ID NO: 360 | Zm00001d005814 cDNA Photosystem I | photosynthesis, light harvesting in |
| | chlorophyll a/b-binding protein 6 | photosystem I |
| | chloroplastic | |
| SEQ ID NO: 361 | Zm00001d033338 cDNA NAD(P)-linked | oxidoreductase activity |
| | oxidoreductase superfamily protein | |
| SEQ ID NO: 362 | Zm00001d053446 cDNA potassium | voltage-gated potassium channel |
| | channel3 | activity |
| SEQ ID NO: 363 | Zm00001d026603 cDNA Magnesium- | photosynthesis, light reaction |
| | chelatase subunit ChlH chloroplastic | |
| SEQ ID NO: 364 | Zm00001d027841 cDNA Ribulose- | pentose-phosphate shunt, non- |
| | phosphate 3-epimerase | oxidative branch |
| SEQ ID NO: 365 | Zm00001d030048 cDNA pfkB-like | isopentenyl diphosphate |
| | carbohydrate kinase family protein | biosynthetic process, |
| | | methylerythritol 4-phosphate |
| | | pathway |
| SEQ ID NO: 366 | Zm00001d005346 cDNA Aldo-keto | oxidoreductase activity |
| | reductase/oxidoreductase | |
| SEQ ID NO: 367 | Zm00001d023706 cDNA thioredoxin M1 | transcription coregulator activity |
| SEQ ID NO: 368 | Zm00001d042050 cDNA Protein | chlorophyll biosynthetic process |
| | RETICULATA-RELATED 4 | |
| | chloroplastic | |
| SEQ ID NO: 369 | Zm00001d042533 cDNA Trigger factor | protein transport |
| SEQ ID NO: 370 | Zm00001d022590 cDNA hypothetical | transcription, DNA-templated |
| | protein | |
| SEQ ID NO: 371 | Zm00001d045431 cDNA Enolase 1 | phosphopyruvate hydratase |
| | | activity |
| SEQ ID NO: 372 | Zm00001d047743 cDNA fatty acid | oxidoreductase activity, acting on |
| | desaturase7 | paired donors, with oxidation of a |
| | | pair of donors resulting in the |
| | | reduction of molecular oxygen to |
| | | two molecules of water |
| SEQ ID NO: 373 | Zm00001d036738 cDNA S-adenosyl-L- | methyltransferase activity |
| | methionine-dependent methyltransferase | |
| | superfamily protein | |
| SEQ ID NO: 374 | Zm00001d018274 cDNA Isoleucine- | valyl-tRNA aminoacylation |
| | tRNA ligase chloroplastic/mitochondrial | |
| SEQ ID NO: 375 | Zm00001d035003 cDNA ferredoxin2 | electron transfer activity |
| SEQ ID NO: 376 | Zm00001d027321 cDNA hypothetical | peptidyl-prolyl cis-trans isomerase |
| | protein | activity |
| SEQ ID NO: 377 | Zm00001d014284 cDNA CMV 1a | methyltransferase activity |
| | interacting protein 1 | |
| SEQ ID NO: 378 | Zm00001d036340 cDNA photosystem III | photosystem II |
| SEQ ID NO: 379 | Zm00001d003767 cDNA Photosystem I | photosynthesis, light harvesting in |
| | subunit O | photosystem I |
| SEQ ID NO: 380 | Zm00001d031997 cDNA NAD(P)- | nucleotide binding |
| | binding Rossmann-fold superfamily | |
| | protein | |
| SEQ ID NO: 381 | Zm00001d019479 cDNA granule-bound | NDP-glucose-starch |
| | starch synthase1b | glucosyltransferase activity |
| SEQ ID NO: 382 | Zm00001d024148 cDNA Photosynthetic | photosynthetic electron transport |
| | NDH subunit of subcomplex B 1 | in photosystem I |
| | chloroplastic | |
| SEQ ID NO: 383 | Zm00001d038579 cDNA | photosynthesis, light reaction |
| | Phosphoglycerate kinase | |
| SEQ ID NO: 384 | Zm00001d037273 cDNA Peptide | electron transport chain |
| | methionine sulfoxide reductase msrB | |
| SEQ ID NO: 385 | Zm00001d025845 cDNA hypothetical | chloroplast thylakoid membrane |
| | protein | |
| SEQ ID NO: 386 | Zm00001d027422 cDNA PsbP-like | chloroplast photosystem II |
| | protein 1 chloroplastic | |
| SEQ ID NO: 387 | Zm00001d024519 cDNA rubredoxin | iron ion binding |
| | family protein | |
| SEQ ID NO: 388 | Zm00001d040163 cDNA deoxy xylulose | 1-deoxy-D-xylulose-5-phosphate |
| | reductoisomerase1 | reductoisomerase activity |
| SEQ ID NO: 389 | Zm00001d012868 cDNA carotene | oxidoreductase activity |
| | isomerase3 | |
| SEQ ID NO: 390 | Zm00001d021763 cDNA photosystem II | photosynthesis, light harvesting in |
| | subunit29 | photosystem I |
| SEQ ID NO: 391 | Zm00001d035761 cDNA Peptidyl-prolyl | peptidyl-prolyl cis-trans isomerase |
| | cis-trans isomerase | activity |
| SEQ ID NO: 392 | Zm00001d032301 cDNA S-adenosyl-L- | methyltransferase activity |
| | methionine-dependent methyltransferase | |
| | superfamily protein | |
| SEQ ID NO: 393 | Zm00001d028562 cDNA Fructose-1,6- | photosynthetic electron transport |
| | bisphosphatase | in photosystem I |
| SEQ ID NO: 394 | Zm00001d034538 cDNA Rubredoxin-like | iron ion binding |
| | superfamily protein | |
| SEQ ID NO: 395 | Zm00001d048116 cDNA hypothetical | isopentenyl diphosphate |
| | protein | biosynthetic process, |
| | | methylerythritol 4-phosphate |
| | | pathway |
| SEQ ID NO: 396 | Zm00001d048998 cDNA Chlorophyll a-b | photosynthesis |
| | binding protein CP26 chloroplastic | |
| SEQ ID NO: 397 | Zm00001d049490 cDNA Protein | translation initiation factor activity |
| | CHLORORESPIRATORY REDUCTION | |
| | 6 chloroplastic | |
| SEQ ID NO: 398 | Zm00001d015975 cDNA putative | lactoylglutathione lyase activity |
| | lactoylglutathione lyase chloroplastic | |
| SEQ ID NO: 399 | Zm00001d021435 cDNA hypothetical | none |
| | protein | |
| SEQ ID NO: 400 | Zm00001d015613 cDNA Protein TIC 21 | protein import into chloroplast |
| | chloroplastic | stroma |
| SEQ ID NO: 401 | Zm00001d039258 cDNA Triose | glucose-6-phosphate |
| | phosphate/phosphate translocator TPT | transmembrane transporter activity |
| | chloroplastic | |
| SEQ ID NO: 402 | Zm00001d007267 cDNA light harvesting | photosynthesis, light harvesting in |
| | chlorophyll a/b binding protein5 | photosystem I |
| SEQ ID NO: 403 | Zm00001d033383 cDNA | thiamine biosynthetic process |
| | hydroxymethylpyrimidine phosphate | |
| | synthase1 | |
| SEQ ID NO: 404 | Zm00001d026645 cDNA K(+) efflux | solute: proton antiporter activity |
| | antiporter 2 chloroplastic | |
| SEQ ID NO: 405 | Zm00001d023757 cDNA NAD(P)H- | heat shock protein binding |
| | quinone oxidoreductase subunit U | |
| | chloroplastic | |
| SEQ ID NO: 406 | Zm00001d034005 cDNA evolutionarily | oxidation-reduction process |
| | conserved C-terminal region 2 | |
| SEQ ID NO: 407 | Zm00001d022381 cDNA NADPH- | hydrogen peroxide catabolic |
| | dependent thioredoxin reductase 3 | process |
| SEQ ID NO: 408 | Zm00001d031962 cDNA hypothetical | protein dephosphorylation |
| | protein | |
| SEQ ID NO: 409 | Zm00001d005446 cDNA Photosystem I | photosystem I reaction center |
| | reaction center subunit IV A | |
| SEQ ID NO: 410 | Zm00001d027511 cDNA Catalase | hydrogen peroxide catabolic |
| | isozyme 2 | process |
| SEQ ID NO: 411 | Zm00001d017178 cDNA hypothetical | primary metabolic process |
| | protein | |
| SEQ ID NO: 412 | Zm00001d03 8947 cDNA putative | electron transfer activity |
| | galacturonosyltransferase-like 9 | |
| SEQ ID NO: 413 | Zm00001d034739 cDNA | acetylpyruvate hydrolase activity |
| | Fumarylacetoacetate (FAA) hydrolase | |
| | family | |
| SEQ ID NO: 414 | Zm00001d044745 cDNA Alanine--tRNA | alanyl-tRNA aminoacylation |
| | ligase chloroplastic/mitochondrial | |
| SEQ ID NO: 415 | Zm00001d038491 cDNA | N-acetyltransferase activity |
| | Acetyltransferase NSI | |
| SEQ ID NO: 416 | Zm00001d014445 cDNA Protein kinase | kinase activity |
| | superfamily protein | |
| SEQ ID NO: 417 | Zm00001d039745 cDNA Protein | phosphoprotein phosphatase |
| | phosphatase 2C | activity |
| SEQ ID NO: 418 | Zm00001d038485 cDNA | photosystem II stabilization |
| | Serine/threonine-protein kinase STN8 | |
| | chloroplastic | |
| SEQ ID NO: 419 | Zm00001d012287 cDNA hypothetical | starch biosynthetic process |
| | protein | |
| SEQ ID NO: 420 | Zm00001d027694 cDNA Solanesyl | plastoquinone biosynthetic process |
| | diphosphate synthase 2 chloroplastic | |
| SEQ ID NO: 421 | Zm00001d003470 cDNA putative plastid- | response to abscisic acid |
| | lipid-associated protein 2 chloroplastic | |
| SEQ ID NO: 422 | Zm00001d019180 cDNA Nudix | hydrolase activity |
| | hydrolase 16 mitochondrial | |
| SEQ ID NO: 423 | Zm00001d007394 cDNA Rubredoxin-like | iron ion binding |
| | superfamily protein | |
| SEQ ID NO: 424 | Zm00001d053432 cDNA iron-sulfur | electron transporter, transferring |
| | protein2 | electrons within cytochrome b6/f |
| | | complex of photosystem II activity |
| SEQ ID NO: 425 | Zm00001d039900 cDNA putative zinc | metalloendopeptidase activity |
| | metalloprotease EGY2 chloroplastic | |
| SEQ ID NO: 426 | Zm00001d050810 cDNA 2-hydroxy-3- | pentose-phosphate shunt |
| | oxopropionate reductase | |
| SEQ ID NO: 427 | Zm00001d016802 cDNA L-ascorbate | L-ascorbate peroxidase activity |
| | peroxidase S chloroplastic/mitochondrial | |
| SEQ ID NO: 428 | Zm00001d004978 cDNA Saccharopine | oxidoreductase activity |
| | dehydrogenase | |
| SEQ ID NO: 429 | Zm00001d028924 cDNA NifU-like | iron-sulfur cluster assembly |
| | protein 1 chloroplastic | |
| SEQ ID NO: 430 | Zm00001d002815 cDNA NAD(P)H- | oxidoreductase activity, acting on |
| | quinone oxidoreductase subunit M | NAD(P)H, quinone or similar |
| | chloroplastic | compound as acceptor |
| SEQ ID NO: 431 | Zm00001d029065 cDNA Protein LRP16 | regulation of transcription, DNA- |
| | | templated |
| SEQ ID NO: 432 | Zm00001d052184 cDNA Protein | chloroplast envelope |
| | CURVATURE THYLAKOID 1D | |
| | chloroplastic | |
| SEQ ID NO: 433 | Zm00001d038337 cDNA DAR GTPase 3 | GTP binding |
| | chloroplastic | |
| SEQ ID NO: 434 | Zm00001d003713 cDNA Exocyst | pollen tube growth |
| | complex component SEC5A | |
| SEQ ID NO: 435 | Zm00001d031953 cDNA Thioredoxin | protein disulfide oxidoreductase |
| | family protein | activity |
| SEQ ID NO: 436 | Zm00001d053576 cDNA putative | eukaryotic translation elongation |
| | elongation factor 1-gamma 2 | factor 1 complex |
| SEQ ID NO: 437 | Zm00001d000123 cDNA NAD(P)- | response to oxidative stress |
| | binding Rossmann-fold superfamily | |
| | protein | |
| SEQ ID NO: 438 | Zm00001d045431 cDNA Enolase 1 | phosphopyruvate hydratase |
| | | activity |
| SEQ ID NO: 439 | Zm00001d036630 cDNA Filamentation | metalloendopeptidase activity |
| | temperature-sensitive H 2B | |
| SEQ ID NO: 440 | Zm00001d048515 cDNA Stress | gene silencing |
| | responsive alpha-beta barrel domain | |
| | protein | |
| SEQ ID NO: 441 | Zm00001d021310 cDNA | reductive pentose-phosphate cycle |
| | Triosephosphate isomerase | |
| SEQ ID NO: 442 | Zm00001d042353 cDNA sucrose | sucrose synthase activity |
| | phosphate synthase2 | |
| SEQ ID NO: 443 | Zm00001d050150 cDNA Adenylate | adenylate kinase activity |
| | kinase 5 chloroplastic | |
| SEQ ID NO: 444 | Zm00001d025545 cDNA zeaxanthin | abscisic acid biosynthetic process |
| | epoxidase2 | |
| SEQ ID NO: 445 | Zm00001d012168 cDNA Membrane- | chloroplast thylakoid membrane |
| | associated protein VIPP1 chloroplastic | |
| SEQ ID NO: 446 | Zm00001d011581 cDNA Peroxiredoxin- | peroxiredoxin activity |
| | 2B | |
| SEQ ID NO: 447 | Zm00001d018030 cDNA Photosynthetic | regulation of transcription by RNA |
| | NDH subunit of subcomplex B 4 | polymerase II |
| | chloroplastic | |
| SEQ ID NO: 448 | Zm00001d018145 cDNA Presequence | protein processing |
| | protease 2 chloroplastic/mitochondrial | |
| SEQ ID NO: 449 | Zm00001d040221 cDNA Peptidase | metalloendopeptidase activity |
| | family M48 family protein | |
| SEQ ID NO: 450 | Zm00001d033594 cDNA Myelin- | phosphorus metabolic process |
| | associated oligodendrocyte basic protein | |
| | isoform 1 | |
| SEQ ID NO: 451 | Zm00001d008625 cDNA Inner membrane | thylakoid membrane organization |
| | protein ALBINO3 chloroplastic | |
| SEQ ID NO: 452 | Zm00001d032380 cDNA acclimation of | photosystem II assembly |
| | photosynthesis to environment | |
| SEQ ID NO: 453 | Zm00001d045575 cDNA Ferredoxin- | photosynthetic electron transport |
| | NADP reductase leaf isozyme 1 | in photosystem I |
| | chloroplastic | |
| SEQ ID NO: 454 | Zm00001d042526 cDNA Rhodanese/Cell | regulation of stomatai closure |
| | cycle control phosphatase superfamily | |
| | protein | |
| SEQ ID NO: 455 | Zm00001d043168 cDNA MAR-binding | photosystem II assembly |
| | filament-like protein 1-1 isoform 2 | |
| SEQ ID NO: 456 | Zm00001d053545 cDNA NAD(P)- | nucleotide binding |
| | binding Rossmann-fold superfamily | |
| | protein | |
| SEQ ID NO: 457 | Zm00001d053981 cDNA putative | pyridoxal phosphate biosynthetic |
| | pyridoxal 5′-phosphate synthase subunit | process |
| | PDX2 | |
| SEQ ID NO: 458 | Zm00001d017746 cDNA vitamin E | tocopherol O-methyltransferase |
| | synthesis4 | activity |
| SEQ ID NO: 459 | Zm00001d012083 cDNA Thioredoxin F- | pentose-phosphate shunt |
| | type chloroplastic | |
| SEQ ID NO: 460 | Zm00001d024718 cDNA Beta-carotene | strigolactone biosynthetic process |
| | isomerase D27 chloroplastic | |
| SEQ ID NO: 461 | Zm00001d021621 cDNA Polynucleotidyl | 3′-5′ exonuclease activity |
| | transferase ribonuclease H fold protein | |
| | with HRDC domain | |
| SEQ ID NO: 462 | Zm00001d015004 cDNA Protein LOW | aromatic amino acid family |
| | PSII ACCUMULATION 3 chloroplastic | biosynthetic process |
| SEQ ID NO: 463 | Zm00001d039131 cDNA ADP glucose | glucose-1-phosphate |
| | pyrophosphorylase2 | adenylyltransferase activity |
| SEQ ID NO: 464 | Zm00001d044970 cDNA putative | protein tyrosine phosphatase |
| | tyrosine-protein phosphatase | activity |
| SEQ ID NO: 465 | Zm00001d018401 cDNA plastid | positive regulation of ubiquitin |
| | transcriptionally active 17 | protein ligase activity |
| SEQ ID NO: 466 | Zm00001d015975 cDNA putative | lactoylglutathione lyase activity |
| | lactoylglutathione lyase chloroplastic | |
| SEQ ID NO: 467 | Zm00001d013428 cDNA | phosphoglucomutase activity |
| | phosphoglucomutase2 | |
| SEQ ID NO: 468 | Zm00001d021246 cDNA Ras-related | chloroplast thylakoid membrane |
| | protein RABA3 | |
| SEQ ID NO: 469 | Zm00001d007921 cDNA Tic62 protein | oxidation-reduction process |
| SEQ ID NO: 470 | Zm00001d027511 cDNA Catalase | hydrogen peroxide catabolic |
| | isozyme 2 | process |
| SEQ ID NO: 471 | Zm00001d027309 cDNA Phosphoglucan | intracellular signal transduction |
| | phosphatase DSP4 chloroplastic | |
| SEQ ID NO: 472 | Zm00001d025544 cDNA Zeaxanthin | zeaxanthin epoxidase [overall] |
| | epoxidase chloroplastic | activity |
| SEQ ID NO: 473 | Zm00001d039276 cDNA Ubiquitin ligase | cellular metabolic process |
| | SINAT3 | |
| SEQ ID NO: 474 | Zm00001d003512 cDNA Zeaxanthin | zeaxanthin epoxidase [overall] |
| | epoxidase chloroplastic | activity |
| SEQ ID NO: 475 | Zm00001d053861 cDNA Putative | GTP binding |
| | translation elongation factor family | |
| | protein | |
| SEQ ID NO: 476 | Zm00001d038894 cDNA | circadian rhythm |
| | Serine/threonine-protein kinase STN7 | |
| | chloroplastic | |
| SEQ ID NO: 477 | Zm00001d051321 cDNA ATP-dependent | metalloendopeptidase activity |
| | zinc metalloprotease FTSH 7 | |
| | chloroplastic | |
| SEQ ID NO: 478 | Zm00001d016826 cDNA proline-rich | anatomical structure |
| | family protein | morphogenesis |
| SEQ ID NO: 479 | Zm00001d016854 cDNA Ferrochelatase | starch biosynthetic process |
| SEQ ID NO: 480 | Zm00001d017435 cDNA hypothetical | none |
| | protein | |
| SEQ ID NO: 481 | Zm00001d048373 cDNA Carotenoid | oxidoreductase activity, acting on |
| | 910(9′10′)-cleavage dioxygenase 1 | single donors with incorporation of |
| | | molecular oxygen, incorporation |
| | | of two atoms of oxygen |
| SEQ ID NO: 482 | Zm00001d018901 cDNA protein | protein binding |
| | containing PDZ domain a K-box domain | |
| | and a TPR region | |
| SEQ ID NO: 483 | Zm00001d019454 cDNA PGR5-like | photosynthetic electron transport |
| | protein 1B chloroplastic | in photosystem I |
| SEQ ID NO: 484 | Zm00001d031899 cDNA malate | malate dehydrogenase (NADP+) |
| | dehydrogenase6 | activity |
| SEQ ID NO: 485 | Zm00001d045706 cDNA Restorer of | aldehyde dehydrogenase (NAD) |
| | fertility2 | activity |
| SEQ ID NO: 486 | Zm00001d035869 cDNA Protein MEI2- | nucleotide binding |
| | like 5 | |
| SEQ ID NO: 487 | Zm00001d053262 cDNA calcium- | protein localization |
| | dependent lipid-binding family protein | |
| SEQ ID NO: 488 | Zm00001d017958 cDNA Glutamine | glutamine biosynthetic process |
| | synthetase root isozyme 3 | |
| SEQ ID NO: 489 | Zm00001d007113 cDNA Xylose | xylose isomerase activity |
| | isomerase | |
| SEQ ID NO: 490 | Zm00001d051650 cDNA Sucrose | transcription, DNA-templated |
| | cleavage protein-like protein | |
| SEQ ID NO: 491 | Zm00001d015138 cDNA hypothetical | nuclear pore |
| | protein | |
| SEQ ID NO: 492 | Zm00001d030103 cDNA putative | xyloglucamxyloglucosyl |
| | xyloglucan endotransglucosylase/ | transferase activity |
| | hydrolase protein 30 | |
| SEQ ID NO: 493 | Zm00001d021846 cDNA Insulin- | metalloendopeptidase activity |
| | degrading enzyme-like 1 peroxisomal | |
| SEQ ID NO: 494 | Zm00001d041576 cDNA Transcription | regulation of transcription, DNA- |
| | factor MYB48 | templated |
| SEQ ID NO: 495 | Zm00001d005391 cDNA Cysteine | cysteine-type endopeptidase |
| | proteinases superfamily protein | activity |
| SEQ ID NO: 496 | Zm00001d009022 cDNA NmrA-like | 166 nucleotide binding |
| | negative transcriptional regulator family | |
| | protein | |
| SEQ ID NO: 497 | Zm00001d041343 cDNA putative disease | defense response |
| | resistance protein | |
| SEQ ID NO: 498 | Zm00001d039965 cDNA Delta(7)-sterol- | fatty acid biosynthetic process |
| | C5(6)-desaturase 1 | |
| SEQ ID NO: 499 | Zm00001d029047 cDNA Receptor-like | signaling receptor activity |
| | protein kinase FERONIA | |
| SEQ ID NO: 500 | Zm00001d028230 cDNA Sugar transport | sucrose transport |
| | protein 13 | |
| SEQ ID NO: 501 | Zm00001d013243 cDNA Cyclic | plant-type hypersensitive response |
| | nucleotide-gated ion channel 2 | |
| SEQ ID NO: 502 | Zm00001d032926 cDNA chlorophyllase2 | chlorophyll catabolic process |
| SEQ ID NO: 503 | Zm00001d045667 cDNA Protein NRT1/ | nitrate assimilation |
| | PTR FAMILY 3.1 | |
| SEQ ID NO: 504 | Zm00001d021846 cDNA Insulin- | metalloendopeptidase activity |
| | degrading enzyme-like 1 peroxisomal | |
| SEQ ID NO: 505 | Zm00001d033469 cDNA Ferredoxin | electron transfer activity |
| SEQ ID NO: 506 | Zm00001d019563 cDNA Aquaporin | transporter activity |
| | PIP2-1 | |
| SEQ ID NO: 507 | Zm00001d003866 cDNA hypothetical | cell wall organization |
| | protein | |
| SEQ ID NO: 508 | Zm00001d039325 cDNA Putative | signaling receptor activity |
| | inactive receptor-like protein kinase | |
| SEQ ID NO: 509 | Zm00001d023516 cDNA Salt stress- | mannose binding |
| | induced protein | |
| SEQ ID NO: 510 | Zm00001d050918 cDNA hypothetical | aldehyde dehydrogenase (NAD) |
| | protein | activity |
| SEQ ID NO: 511 | Zm00001d025253 cDNA hypothetical | none |
| | protein | |
| SEQ ID NO: 512 | Zm00001d024499 cDNA Nuclear factor 1 | aminoacyl-tRNA hydrolase |
| | A-type isoform 2 | activity |
| SEQ ID NO: 513 | Zm00001d045948 cDNA Protein | drug transmembrane transporter |
| | DETOXIFICATION 16 | activity |
| SEQ ID NO: 514 | Zm00001d021569 cDNA Transparent | drug transmembrane transporter |
| | testa 12 protein | activity |
| SEQ ID NO: 515 | Zm00001d053327 cDNA Galactoside 2- | xyloglucan biosynthetic process |
| | alpha-L-fucosyltransferase | |
| SEQ ID NO: 516 | Zm00001d047208 cDNA WAT1-related | auxin-activated signaling pathway |
| | protein | |
| SEQ ID NO: 517 | Zm00001d007687 cDNA Tropinone | response to karrikin |
| | reductase-like protein | |
| SEQ ID NO: 518 | Zm00001d015126 cDNA response to low | pyridoxamine-phosphate oxidase |
| | sulfur 3 | activity |
| SEQ ID NO: 519 | Zm00001d034781 cDNA G-type lectin S- | multicellular organism |
| | receptor-like serine/threonine-protein | development |
| | kinase | |
| SEQ ID NO: 520 | Zm00001d016655 cDNA hypothetical | voltage-gated potassium channel |
| | protein | activity |
| SEQ ID NO: 521 | Zm00001d043517 cDNA Peptidase M28 | regulation of inflorescence |
| | family protein | meristem growth |
| SEQ ID NO: 522 | Zm00001d045667 cDNA Protein NRT1/ | nitrate assimilation |
| | PTR FAMILY 3.1 | |
| SEQ ID NO: 523 | Zm00001d000126 cDNA Function | voltage-gated potassium channel |
| | unknown | activity |
| SEQ ID NO: 524 | Zm00001d029706 cDNA Glutathione S- | glutathione transferase activity |
| | transferase GSTU6-like protein | |
| SEQ ID NO: 525 | Zm00001d029321 cDNA Cationic amino | amino acid transmembrane |
| | acid transporter | transporter activity |
| SEQ ID NO: 526 | Zm00001d014701 cDNA Transcription | regulation of transcription, DNA- |
| | regulator HTH, Myb-type, DNA-binding | templated |
| | protein | |
| SEQ ID NO: 527 | Zm00001d049624 cDNA Glutamate-rich | zinc ion transmembrane transport |
| | WD repeat-containing protein 1-like | |
| | protein | |
| SEQ ID NO: 528 | Zm00001d034359 cDNA Zinc finger, | nucleic acid binding |
| | C2H2-type/integrase, DNA-binding | |
| | protein | |
| SEQ ID NO: 529 | Zm00001d033924 cDNA Cell wall | proton-transporting ATP synthase |
| | protein pherophorin-C10 (PHC10) | activity, rotational mechanism |
| SEQ ID NO: 530 | Zm00001d032222 cDNA UDP- | glucuronosyltransferase activity |
| | glycosyltransferase 85A2-like protein | |
| SEQ ID NO: 531 | Zm00001d018155 cDNA Galactoside 2- | cell wall biogenesis |
| | alpha-L-fucosyltransferase-like protein | |
| SEQ ID NO: 532 | Zm00001d036263 cDNA Receptor | protein serine/threonine kinase |
| | protein serine/threonine kinase | activity |
| SEQ ID NO: 533 | Zm00001d044043 cDNA Acetylajmaline | lipid catabolic process |
| | esterase | |
| SEQ ID NO: 534 | Zm00001d027425 cDNA MADS-box | transcription, DNA-templated |
| | transcription factor 56-like protein | |
| SEQ ID NO: 535 | Zm00001d048635 cDNA Putative disease | plant-type hypersensitive response |
| | resistance RPP13-like protein 3-like | |
| | protein | |
| SEQ ID NO: 536 | Zm00001d006795 cDNA Omega- | transferase activity, transferring |
| | hydroxypalmitate O-feruloyl transferase | acyl groups other than amino-acyl |
| | | groups |
| SEQ ID NO: 537 | Zm00001d041972 cDNA Cellulose | ellulose biosynthetic process |
| | synthase-like protein G2-like protein | |
| SEQ ID NO: 538 | Zm00001d000183 cDNA Hexose carrier | carbohydrate transport |
| | protein HEX6-like sugar transport protein | |
| SEQ ID NO: 539 | Zm00001d039575 cDNA 1- | oxidoreductase activity, acting on |
| | aminocyclopropane-1-carboxylate oxidase | paired donors, with incorporation |
| | | or reduction of molecular oxygen, |
| | | 2-oxoglutarate as one donor, and |
| | | incorporation of one atom each of |
| | | oxygen into both donors |
| SEQ ID NO: 540 | Zm00001d046202 cDNA Transposase, | sequence-specific DNA binding |
| | Ptta/En/Spm, plant | |
| SEQ ID NO: 541 | Zm00001d013571 cDNA Ubiquitin- | protein binding |
| | protein ligase/zinc ion binding protein | |
| SEQ ID NO: 542 | Zm00001d015470 cDNA GDU1 | multicellular organism |
| | | development |
| SEQ ID NO: 543 | Zm00001d053965 cDNA 16.9 kDa class I | response to stress |
| | heat shock protein 1 | |
| SEQ ID NO: 544 | Zm00001d029164 cDNA Inactive beta- | ellular polysaccharide catabolic |
| | amylase 9-like protein | process |
| SEQ ID NO: 545 | Zm00001d031717 cDNA Transcription | transcription, DNA-templated |
| | factor MYC4-like protein | |
| SEQ ID NO: 546 | Zm00001d035767 cDNA Jasmonate O- | jasmonic acid metabolic process |
| | methyltransferase | |
| SEQ ID NO: 547 | Zm00001d004279 cDNA Myrcene | monoterpenoid biosynthetic |
| | synthase, chloroplastic-like protein | process |
| SEQ ID NO: 548 | Zm00001d003462 cDNA Lipoyl synthase | lipoate synthase activity |
| | 2, mitochondrial-like protein | |
| SEQ ID NO: 549 | Zm00001d026360 cDNA Cyclin PHO80- | protein kinase binding |
| | like protein | |
| SEQ ID NO: 550 | Zm00001d013984 cDNA Protein | 3′-5′-exoribonuclease activity |
| | EXECUTER 1 (EX1) | |
| SEQ ID NO: 551 | Zm00001d047207 cDNA Copper- | calcium-transporting ATPase |
| | transporting ATPase (CTATP) | activity |
| SEQ ID NO: 552 | Zm00001d030381 | protein-chromophore linkage |
| | cDNA Deoxyribodipyrimidine photo- | |
| | lyase; Photoreactivating enzyme CPD | |
| | photolyase | |
| SEQ ID NO: 553 | Zm00001d046755 cDNA Two- | phosphorelay response regulator |
| | component response regulator ARR12- | activity |
| | like protein | |
| SEQ ID NO: 554 | Zm00001d007167 cDNA CBL-interacting | peptidyl-serine phosphorylation |
| | protein kinase 07 | |
| SEQ ID NO: 555 | Zm00001d039392 cDNA High affinity | L-alpha-amino acid |
| | cationic amino acid transporter | transmembrane transport |
| SEQ ID NO: 556 | Zm00001d013627 | chromatin silencing by small RNA |
| | cDNA Retinoblastoma-binding protein | |
| SEQ ID NO: 557 | Zm00001d044717 cDNA Cyclic | ion gated channel activity |
| | nucleotide binding/inward rectifier | |
| | potassium channel | |
| SEQ ID NO: 558 | Zm00001d032933 cDNA KIP1-like | N-acetyltransferase activity |
| | protein | |
| SEQ ID NO: 559 | Zm00001d034467 cDNA Transcription | cell differentiation |
| | regulator HTH, Myb-type, DNA-binding | |
| | protein | |
| SEQ ID NO: 560 | Zm00001d018797 cDNA Photosystem I | photosynthesis |
| | reaction center subunit psaK, chloroplast | |
| | precursor | |
| SEQ ID NO: 561 | Zm00001d002934 cDNA Secondary wall | sequence-specific DNA binding |
| | NAC transcription factor 4 | |
| SEQ ID NO: 562 | Zmm28 | Transcription factor |
| SEQ ID NO: 563 | Zm00001d003911 (AFB2-like/TIR1-like | Auxin receptor |
| | (afb2)) | |
| SEQ ID NO: 564 | Zm00001d003911 genomic (AFB2- | Auxin receptor |
| | like/TIR1-like (afb2)) | |
| SEQ ID NO: 565 | AT5G24800.1, BASIC LEUCINE | Transcription factor |
| | ZIPPER 9 | |
| SEQ ID NO: 566 | AT5G24800.1, BASIC LEUCINE | Transcription factor |
| | ZIPPER 9 | |
| SEQ ID NO: 567 | Zm00001d051684, CONSTANS gene | Transcription factor |
| | family like 14 | |
| SEQ ID NO: 568 | Zm00001d044194, MYB-LIKE DNA- | Transcription factor |
| | BINDING PROTEIN, mybr97 - MYB- | |
| | related-transcription factor 97 | |
| SEQ ID NO: 569 | Zm00001d028974, ETHYLENE | Transcription factor |
| | INSENSITIVE 3-LIKE 1 | |
| SEQ ID NO: 570 | Zm00001d044301, PROTEIN | Signal transduction |
| | PHOSPHATASE 2C | |
| SEQ ID NO: 571 | Zm00001d015239, LANOSTEROL | Steroid biosynthetic process |
| | SYNTHASE | |
| SEQ ID NO: 573 | Zm00001d023933, 2,4-dihydroxy-1,4- | Response to wounding |
| | benzoxazin-3-one-glucoside dioxygenase/ | |
| | DIBOA-Glc dioxygenase | |
| SEQ ID NO: 573 | Zm00001d029875, ZmMYBR43, Myb- | Transcription factor |
| | like DNA-binding domain (Myb_DNA- | |
| | binding) | |
| SEQ ID NO: 574 | Zm00001d051684, CONSTANS gene | Transcription factor |
| | family like 14 | |
| SEQ ID NO: 575 | Zm00001d044194, MYB-LIKE DNA- | Transcription factor |
| | BINDING PROTEIN, mybr97 - MYB- | |
| | related-transcription factor 97 | |
| SEQ ID NO: 576 | Zm00001d028974, ETHYLENE | Transcription factor |
| | INSENSITIVE 3-LIKE 1 | |
| SEQ ID NO: 577 | Zm00001d044301, PROTEIN | Signal transduction |
| | PHOSPHATASE 2C | |
| SEQ ID NO: 578 | Zm00001d015239, LANOSTEROL | Steroid biosynthetic process |
| | SYNTHASE | |
| SEQ ID NO: 579 | Zm00001d023933, 2,4-dihydroxy-1,4- | Response to wounding |
| | benzoxazin-3-one-glucoside dioxygenase/ | |
| | DIBOA-Glc dioxygenase | |

### DETAILED DESCRIPTION

### I. Compositions

### A. Polynucleotides and Polypeptides

[0016] The present disclosure provides polynucleotides encoding polypeptides. Accordingly, as used herein “polypeptide,” “protein,” or the like, refers to a protein represented by a SEQ ID NO.

[0017] One aspect of the disclosure provides a polynucleotide encoding a polypeptide comprising an amino acid sequence that is at least 80-99% identical to the amino acid sequence of any one of SEQ ID NOS: 1-11, 23-31, 40-299, 563, 565, and 567-573).

[0018] As used herein “encoding,” “encoded,” or the like, with respect to a specified nucleic acid, is meant comprising the information for translation into the specified protein. A nucleic acid encoding a protein may comprise non-translated sequences (e.g., introns) within translated regions of the nucleic acid, or may lack such intervening non-translated sequences (e.g., as in cDNA). The information by which a protein is encoded is specified by the use of codons. Typically, the amino acid sequence is encoded by the nucleic acid using the “universal” genetic code. However, variants of the universal code, such as is present in some plant, animal and fungal mitochondria, the bacterium Mycoplasma capricolum (Yamao, et al., (1985) Proc. Natl. Acad. Sci. USA 82:2306-9) or the ciliate Macronucleus, may be used when the nucleic acid is expressed using these organisms.

[0019] When the nucleic acid is prepared or altered synthetically, advantage can be taken of known codon preferences of the intended host where the nucleic acid is to be expressed. For example, although nucleic acid sequences of the present invention may be expressed in both monocotyledonous and dicotyledonous plant species, sequences can be modified to account for the specific codon preferences and GC content preferences of monocotyledonous plants or dicotyledonous plants as these preferences have been shown to differ (Murray, et al., (1989) Nucleic Acids Res. 17:477-98).

[0020] As used herein, “polynucleotide” includes reference to a deoxyribopolynucleotide, ribopolynucleotide or analogs thereof that have the essential nature of a natural ribonucleotide in that they hybridize, under stringent hybridization conditions, to substantially the same nucleotide sequence as naturally occurring nucleotides and/or allow translation into the same amino acid(s) as the naturally occurring nucleotide(s). A polynucleotide can be full-length or a subsequence of a structural or regulatory gene. Unless otherwise indicated, the term includes reference to the specified sequence as well as the complementary sequence thereof. Thus, DNAs or RNAs with backbones modified for stability or for other reasons are “polynucleotides” as that term is intended herein. Moreover, DNAs or RNAs comprising unusual bases, such as inosine, or modified bases, such as tritylated bases, to name just two examples, are polynucleotides as the term is used herein. It will be appreciated that a great variety of modifications have been made to DNA and RNA that serve many useful purposes known to those of skill in the art. The term polynucleotide as it is employed herein embraces such chemically, enzymatically or metabolically modified forms of polynucleotides, as well as the chemical forms of DNA and RNA characteristic of viruses and cells, including inter alia, simple and complex cells.

[0021] The terms “polypeptide,” “peptide” and “protein” are used interchangeably herein to refer to a polymer of amino acid residues. The terms apply to amino acid polymers in which one or more amino acid residues is an artificial chemical analogue of a corresponding naturally occurring amino acid, as well as to naturally occurring amino acid polymers.

[0022] As used herein, “sequence identity” or “identity” in the context of two nucleic acid or polypeptide sequences includes reference to the residues in the two sequences, which are the same when aligned for maximum correspondence over a specified comparison window. When percentage of sequence identity is used in reference to proteins it is recognized that residue positions which are not identical often differ by conservative amino acid substitutions, where amino acid residues are substituted for other amino acid residues with similar chemical properties (e.g., charge or hydrophobicity) and therefore do not change the functional properties of the molecule. Where sequences differ in conservative substitutions, the percent sequence identity may be adjusted upwards to correct for the conservative nature of the substitution. Sequences, which differ by such conservative substitutions, are said to have “sequence similarity” or “similarity.” Means for making this adjustment are well known to those of skill in the art. Typically, this involves scoring a conservative substitution as a partial rather than a full mismatch, thereby increasing the percentage sequence identity. Thus, for example, where an identical amino acid is given a score of 1 and a non-conservative substitution is given a score of zero, a conservative substitution is given a score between zero and 1. The scoring of conservative substitutions is calculated, e.g., according to the algorithm of Meyers and Miller, (1988) Computer Applic. Biol. Sci. 4:11-17, e.g., as implemented in the program PC/GENE (Intelligenetics, Mountain View, Calif., USA).

[0023] As used herein, “percentage of sequence identity” means the value determined by comparing two optimally aligned sequences over a comparison window, wherein the portion of the polynucleotide sequence in the comparison window may comprise additions or deletions (i.e., gaps) as compared to the reference sequence (which does not comprise additions or deletions) for optimal alignment of the two sequences. The percentage is calculated by determining the number of positions at which the identical nucleic acid base or amino acid residue occurs in both sequences to yield the number of matched positions, dividing the number of matched positions by the total number of positions in the window of comparison and multiplying the result by 100 to yield the percentage of sequence identity.

[0024] As used herein, “reference sequence” is a defined sequence used as a basis for sequence comparison. A reference sequence may be a subset or the entirety of a specified sequence; for example, as a segment of a full-length cDNA or gene sequence or the complete cDNA or gene sequence.

[0025] As used herein, “comparison window” means includes reference to a contiguous and specified segment of a polynucleotide sequence, wherein the polynucleotide sequence may be compared to a reference sequence and wherein the portion of the polynucleotide sequence in the comparison window may comprise additions or deletions (i.e., gaps) compared to the reference sequence (which does not comprise additions or deletions) for optimal alignment of the two sequences. Generally, the comparison window is at least 20 contiguous nucleotides in length, and optionally can be 30, 40, 50, 100 or longer. Those of skill in the art understand that to avoid a high similarity to a reference sequence due to inclusion of gaps in the polynucleotide sequence a gap penalty is typically introduced and is subtracted from the number of matches.

[0026] Methods of alignment of nucleotide and amino acid sequences for comparison are well known in the art. The local homology algorithm (BESTFIT) of Smith and Waterman, (1981) Adv. Appl. Math 2:482, may conduct optimal alignment of sequences for comparison; by the homology alignment algorithm (GAP) of Needleman and Wunsch, (1970) J. Mol. Biol. 48:443-53; by the search for similarity method (Tfasta and Fasta) of Pearson and Lipman, (1988) Proc. Natl. Acad. Sci. USA 85:2444; by computerized implementations of these algorithms, including, but not limited to: CLUSTAL in the PC/Gene program by Intelligenetics, Mountain View, California, GAP, BESTFIT, BLAST, FASTA and TFASTA in the Wisconsin Genetics Software Package®, Version 8 (available from Genetics Computer Group (GCG® programs (Accelrys, Inc., San Diego, Calif.)). The CLUSTAL program is well described by Higgins and Sharp, (1988) Gene 73:237 44; Higgins and Sharp, (1989) CABIOS 5:151 3; Corpet, et al., (1988) Nucleic Acids Res. 16:10881-90; Huang, et al., (1992) Computer Applications in the Biosciences 8:155-65, and Pearson, et al., (1994) Meth. Mol. Biol. 24:307-31. The preferred program to use for optimal global alignment of multiple sequences is PileUp (Feng and Doolittle, (1987) J. Mol. Evol., 25:351-60 which is similar to the method described by Higgins and Sharp, (1989) CABIOS 5:151-53 and hereby incorporated by reference). The BLAST family of programs which can be used for database similarity searches includes: BLASTN for nucleotide query sequences against nucleotide database sequences; BLASTX for nucleotide query sequences against protein database sequences; BLASTP for protein query sequences against protein database sequences; TBLASTN for protein query sequences against nucleotide database sequences; and TBLASTX for nucleotide query sequences against nucleotide database sequences. See, CURRENT PROTOCOLS IN MOLECULAR BIOLOGY, Chapter 19, Ausubel, et al., eds., Greene Publishing and Wiley-Interscience, New York (1995).

[0027] GAP uses the algorithm of Needleman and Wunsch, supra, to find the alignment of two complete sequences that maximizes the number of matches and minimizes the number of gaps. GAP considers all possible alignments and gap positions and creates the alignment with the largest number of matched bases and the fewest gaps. It allows for the provision of a gap creation penalty and a gap extension penalty in units of matched bases. GAP must make a profit of gap creation penalty number of matches for each gap it inserts. If a gap extension penalty greater than zero is chosen, GAP must, in addition, make a profit for each gap inserted of the length of the gap times the gap extension penalty. Default gap creation penalty values and gap extension penalty values in Version 10 of the Wisconsin Genetics Software Package® are 8 and 2, respectively. The gap creation and gap extension penalties can be expressed as an integer selected from the group of integers consisting of from 0 to 100. Thus, for example, the gap creation and gap extension penalties can be 0, 1, 2, 3, 4, 5, 6, 7, 8, 9, 10, 15, 20, 30, 40, 50 or greater.

[0028] GAP presents one member of the family of best alignments. There may be many members of this family, but no other member has a better quality. GAP displays four figures of merit for alignments: Quality, Ratio, Identity and Similarity. The Quality is the metric maximized in order to align the sequences. Ratio is the quality divided by the number of bases in the shorter segment. Percent Identity is the percent of the symbols that actually match. Percent Similarity is the percent of the symbols that are similar. Symbols that are across from gaps are ignored. A similarity is scored when the scoring matrix value for a pair of symbols is greater than or equal to 0.50, the similarity threshold. The scoring matrix used in Version 10 of the Wisconsin Genetics Software Package® is BLOSUM62 (see, Henikoff and Henikoff, (1989) Proc. Natl. Acad. Sci. USA 89:10915).

[0029] Unless otherwise stated, sequence identity/similarity values provided herein refer to the value obtained using the BLAST 2.0 suite of programs using default parameters (Altschul, et al., (1997) Nucleic Acids Res. 25:3389-402).

[0030] As those of ordinary skill in the art will understand, BLAST searches assume that proteins can be modeled as random sequences. However, many real proteins comprise regions of nonrandom sequences, which may be homopolymeric tracts, short-period repeats, or regions enriched in one or more amino acids. Such low-complexity regions may be aligned between unrelated proteins even though other regions of the protein are entirely dissimilar. A number of low-complexity filter programs can be employed to reduce such low-complexity alignments. For example, the SEG (Wooten and Federhen, (1993) Comput. Chem. 17:149-63) and XNU (Claverie and States, (1993) Comput. Chem. 17:191-201) low-complexity filters can be employed alone or in combination.

[0031] Accordingly, in any of the embodiments described herein, the polynucleotide may encode a polypeptide that is at least 80% identical to any one of SEQ ID NOS: 1-11, 23-31, 40-299, 563, 565, and 567-573. For example, the polynucleotide may encode a polypeptide that is at least 81% identical, at least 82% identical, at least 83% identical, at least 84% identical, at least 85% identical, at least 86% identical, at least 87% identical, at least 88% identical, at least 89% identical, at least 90% identical, at least 91% identical, at least 92% identical, at least 93% identical, at least 94% identical, at least 95% identical, at least 96% identical, at least 97% identical, at least 98% identical, or at least 99% identical to the amino acid sequence of any one of SEQ ID NOS: 1-11, 23-31, 40-299, 563, 565, and 567-573.

### B. Recombinant DNA Construct

[0032] Also provided is a recombinant DNA construct comprising any of the polynucleotides described herein. In certain embodiments, the recombinant DNA construct further comprises at least one regulatory element. In certain embodiments, the at least one regulatory element of the recombinant DNA construct comprises a promoter. In certain embodiments, the promoter is a heterologous promoter.

[0033] As used herein, a “recombinant DNA construct” comprises two or more operably linked DNA segments, preferably DNA segments that are not operably linked in nature (i.e., heterologous). Non-limiting examples of recombinant DNA constructs include a polynucleotide of interest operably linked to heterologous sequences, also referred to as “regulatory elements,” which aid in the expression, autologous replication, and/or genomic insertion of the sequence of interest. Such regulatory elements include, for example, promoters, termination sequences, enhancers, etc., or any component of an expression cassette; a plasmid, cosmid, virus, autonomously replicating sequence, phage, or linear or circular single-stranded or double-stranded DNA or RNA nucleotide sequence; and/or sequences that encode heterologous polypeptides.

[0034] The polynucleotides described herein can be provided in expression cassettes for expression in a plant of interest or any organism of interest. The cassette can include 5′ and 3′ regulatory sequences operably linked to a polynucleotide. “Operably linked” is intended to mean a functional linkage between two or more elements. For, example, an operable linkage between a polynucleotide of interest and a regulatory sequence (e.g., a promoter) is a functional link that allows for expression of the polynucleotide of interest. Operably linked elements may be contiguous or non-contiguous. When used to refer to the joining of two protein coding regions, operably linked is intended that the coding regions are in the same reading frame. The cassette may additionally contain at least one additional gene to be cotransformed into the organism. Alternatively, the additional gene(s) can be provided on multiple expression cassettes. Such an expression cassette is provided with a plurality of restriction sites and/or recombination sites for insertion of the polynucleotide to be under the transcriptional regulation of the regulatory regions. The expression cassette may additionally contain selectable marker genes.

[0035] The expression cassette can include in the 5′-3′ direction of transcription, a transcriptional and translational initiation region (e.g., a promoter), a polynucleotide, and a transcriptional and translational termination region (e.g., termination region) functional in plants. The regulatory regions (e.g., promoters, transcriptional regulatory regions, and translational termination regions) and/or the polynucleotide may be native/analogous to the host cell or to each other. Alternatively, the regulatory regions and/or the polynucleotide may be heterologous to the host cell or to each other.

[0036] As used herein, “heterologous” in reference to a sequence is a sequence that originates from a foreign species, or, if from the same species, is substantially modified from its native form in composition and/or genomic locus by deliberate human intervention. For example, a promoter operably linked to a heterologous polynucleotide that is from a species different from the species from which the polynucleotide was derived, or, if from the same/analogous species, one or both are substantially modified from their original form and/or genomic locus, or the promoter is not the native promoter for the operably linked polynucleotide.

[0037] The termination region may be native with the transcriptional initiation region, with the plant host, or may be derived from another source (i.e., foreign or heterologous) than the promoter, the polynucleotide, the plant host, or any combination thereof.

[0038] The expression cassette may additionally contain a 5′ leader sequences. Such leader sequences can act to enhance translation. Translation leaders are known in the art and include viral translational leader sequences.

[0039] In preparing the expression cassette, the various DNA fragments may be manipulated, to provide for the DNA sequences in the proper orientation and, as appropriate, in the proper reading frame. Toward this end, adapters or linkers may be employed to join the DNA fragments or other manipulations may be involved to provide for convenient restriction sites, removal of superfluous DNA, removal of restriction sites, or the like. For this purpose, in vitro mutagenesis, primer repair, restriction, annealing, resubstitutions, e.g., transitions and transversions, may be involved.

[0040] As used herein “promoter” refers to a region of DNA upstream from the start of transcription and involved in recognition and binding of RNA polymerase and other proteins to initiate transcription. A “plant promoter” is a promoter capable of initiating transcription in plant cells. Exemplary plant promoters include, but are not limited to, those that are obtained from plants, plant viruses and bacteria which comprise genes expressed in plant cells such Agrobacterium or Rhizobium. Certain types of promoters preferentially initiate transcription in certain tissues, such as leaves, roots, seeds, fibers, xylem vessels, tracheids or sclerenchyma. Such promoters are referred to as “tissue preferred.” A “cell type” specific promoter primarily drives expression in certain cell types in one or more organs, for example, vascular cells in roots or leaves. An “inducible” or “regulatable” promoter is a promoter, which is under environmental control. Examples of environmental conditions that may affect transcription by inducible promoters include anaerobic conditions or the presence of light. Another type of promoter is a developmentally regulated promoter, for example, a promoter that drives expression during pollen development. Tissue preferred, cell type specific, developmentally regulated and inducible promoters constitute the class of “non-constitutive” promoters. A “constitutive” promoter is a promoter, which is active under most environmental conditions. Constitutive promoters include, for example, the core promoter of the Rsyn7 promoter and other constitutive promoters disclosed in WO 99/43838 and U.S. Pat. No. 6,072,050; the core CaMV 35S promoter (Odell et al. (1985) Nature 313:810-812); rice actin (McElroy et al. (1990) Plant Cell 2:163-171); ubiquitin (Christensen et al. (1989) Plant Mol. Biol. 12:619-632 and Christensen et al. (1992) Plant Mol. Biol. 18:675-689); pEMU (Last et al. (1991) Theor. Appl. Genet. 81:581-588); MAS (Velten et al. (1984) EMBO J. 3:2723-2730); ALS promoter (U.S. Pat. No. 5,659,026); GOS2 (U.S. Pat. No. 6,504,083), and the like. Other constitutive promoters include, for example, U.S. Pat. Nos. 5,608,149; 5,608,144; 5,604,121; 5,569,597; 5,466,785; 5,399,680; 5,268,463; 5,608,142; and 6,177,611.

[0041] Also contemplated are synthetic promoters which include a combination of one or more heterologous regulatory elements.

### C. Plants and Plant Cells

[0042] Provided are plants, plant cells, plant parts, seed, and grain comprising a polynucleotide sequence described herein or a recombinant DNA construct described herein, so that the plants, plant cells, plant parts, seed, and/or grain have increased expression of a polypeptide. In certain embodiments, the plants, plant cells, plant parts, seeds, and/or grain have stably incorporated an exogenous polynucleotide described herein into its genome. In certain embodiments, the plants, plant cells, plant parts, seeds, and/or grain can comprise multiple polynucleotides (i.e., at least 1, 2, 3, 4, 5, 6 or more).

[0043] In specific embodiments, the polynucleotide(s) in the plants, plant cells, plant parts, seeds, and/or grain are operably linked to a heterologous regulatory element, such as, but not limited to, a constitutive promoter, a tissue-preferred promoter, or a synthetic promoter for expression in plants or a constitutive enhancer. For example, in certain embodiments the heterologous regulatory element is the maize GOS2 promoter.

[0044] Also provided herein are plants, plant cells, plant parts, seeds, and grain comprising an introduced genetic modification at a genomic locus that encodes a polypeptide comprising an amino acid sequence that is at least 80% identical to an amino acid sequence selected from the group consisting of SEQ ID NOS: 1-11, 23-31, 40-299, 563, 565, and 567-573.

[0045] In certain embodiments, the genetic modification increases the activity of the protein. In certain embodiments, the genetic modification increases the level of the protein. In certain embodiments, the genetic modification increases both the level and activity of the protein.

[0046] A “genomic locus” as used herein, generally refers to the location on a chromosome of the plant where a gene, such as a polynucleotide encoding a polypeptide, is found. As used herein, “gene” includes a nucleic acid fragment that expresses a functional molecule such as, but not limited to, a specific protein coding sequence and regulatory elements, such as those preceding (5′ non-coding sequences) and following (3′ non-coding sequences) the coding sequence.

[0047] A “regulatory element” generally refers to a transcriptional regulatory element involved in regulating the transcription of a nucleic acid molecule such as a gene or a target gene. The regulatory element is a nucleic acid and may include a promoter, an enhancer, an intron, a 5′-untranslated region (5′-UTR, also known as a leader sequence), or a 3′-UTR or a combination thereof. A regulatory element may act in “cis” or “trans”, and generally it acts in “cis”, i.e. it activates expression of genes located on the same nucleic acid molecule, e.g. a chromosome, where the regulatory element is located.

[0048] An “enhancer” element is any nucleic acid molecule that increases transcription of a nucleic acid molecule when functionally linked to a promoter regardless of its relative position.

[0049] A “repressor” (also sometimes called herein silencer) is defined as any nucleic acid molecule which inhibits the transcription when functionally linked to a promoter regardless of relative position.

[0050] The term “cis-element” generally refers to transcriptional regulatory element that affects or modulates expression of an operably linked transcribable polynucleotide, where the transcribable polynucleotide is present in the same DNA sequence. A cis-element may function to bind transcription factors, which are trans-acting polypeptides that regulate transcription.

[0051] An “intron” is an intervening sequence in a gene that is transcribed into RNA but is then excised in the process of generating the mature mRNA. The term is also used for the excised RNA sequences. An “exon” is a portion of the sequence of a gene that is transcribed and is found in the mature messenger RNA derived from the gene but is not necessarily a part of the sequence that encodes the final gene product.

[0052] The 5′ untranslated region (5′UTR) (also known as a translational leader sequence or leader RNA) is the region of an mRNA that is directly upstream from the initiation codon. This region is involved in the regulation of translation of a transcript by differing mechanisms in viruses, prokaryotes and eukaryotes.

[0053] The “3′ non-coding sequences” refer to DNA sequences located downstream of a coding sequence and include polyadenylation recognition sequences and other sequences encoding regulatory signals capable of affecting mRNA processing or gene expression. The polyadenylation signal is usually characterized by affecting the addition of polyadenylic acid tracts to the 3′ end of the mRNA precursor.

[0054] “Genetic modification,” “DNA modification,” and the like refers to a site-specific modification that alters or changes the nucleotide sequence at a specific genomic locus of the plant. The genetic modification of the compositions and methods described herein may be any modification known in the art such as, for example, insertion, deletion, single nucleotide polymorphism (SNP), and or a polynucleotide modification. Additionally, the targeted DNA modification in the genomic locus may be located anywhere in the genomic locus, such as, for example, a coding region of the encoded polypeptide (e.g., exon), a non-coding region (e.g., intron), a regulatory element, or untranslated region.

[0055] As used herein, a “targeted” genetic modification or “targeted” DNA modification, refers to the direct manipulation of an organism's genes. The targeted modification may be introduced using any technique known in the art, such as, for example, plant breeding, genome editing, or single locus conversion.

[0056] The type and location of the DNA modification of the polynucleotide is not particularly limited so long as the DNA modification results in increased expression and/or activity of the protein encoded by the corresponding polynucleotide.

[0057] In certain embodiments, the plant, plant cells, plant parts, seeds, and/or grain comprise one or more nucleotide modifications present within (a) the coding region; (b) non-coding region; (c) regulatory sequence; (d) untranslated region, or (e) any combination of (a)-(d) of an endogenous polynucleotide encoding a polypeptide.

[0058] In certain embodiments the DNA modification is an insertion of one or more nucleotides, preferably contiguous, in the genomic locus. For example, the insertion of an expression modulating element (EME), such as an EME described in PCT/US2018/025446, in operable linkage with the gene of interest described herein. In certain embodiments, the targeted DNA modification may be the replacement of an endogenous promoter with another promoter known in the art to have higher expression, such as, for example, the maize GOS2 promoter. In certain embodiments, the targeted DNA modification may be the insertion of a promoter known in the art to have higher expression, such as, for example, the maize GOS2 promoter, into the 5′UTR so that expression of the endogenous polypeptide is controlled by the inserted promoter. In certain embodiments, the DNA modification is a modification to optimize Kozak context to increase expression. In certain embodiments, the DNA modification is a polynucleotide modification or SNP at a site that regulates the stability of the expressed protein.

[0059] As used herein “increased,” “increase,” or the like refers to any detectable increase in an experimental group (e.g., plant with a DNA modification described herein) as compared to a control group (e.g., wild-type plant that does not comprise the DNA modification). Accordingly, increased expression of a protein comprises any detectable increase in the total level of the protein in a sample and can be determined using routine methods in the art such as, for example, Western blotting and ELISA.

[0060] In certain embodiments, the genomic locus has more than one (e.g., 2, 3, 4, 5, 6, 7, 8, 9, or 10) DNA modification. For example, the translated region and a regulatory element of a genomic locus may each comprise a targeted DNA modification. In certain embodiments, more than one genomic locus of the plant may comprise a DNA modification.

[0061] The DNA modification of the genomic locus may be done using any genome modification technique known in the art or described herein. In certain embodiments the targeted DNA modification is through a genome modification technique selected from the group consisting of a polynucleotide-guided endonuclease, CRISPR-Cas endonucleases, base editing deaminases, zinc finger nuclease, a transcription activator-like effector nuclease (TALEN), engineered site-specific meganuclease, or Argonaute.

[0062] In certain embodiments, the genome modification may be facilitated through the induction of a double-stranded break (DSB) or single-strand break, in a defined position in the genome near the desired alteration. DSBs can be induced using any DSB-inducing agent available, including, but not limited to, TALENs, meganucleases, zinc finger nucleases, Cas9-gRNA systems (based on bacterial CRISPR-Cas systems), guided cpfl endonuclease systems, and the like. In some embodiments, the introduction of a DSB can be combined with the introduction of a polynucleotide modification template.

[0063] The polynucleotides or recombinant DNA constructs disclosed herein may be used for transformation of any plant species, including, but not limited to, monocots and dicots. Additionally, the genetic modifications described herein may be used to modify any plant species, including, but not limited to, monocots and dicots.

[0064] In specific embodiments, plants of the present disclosure are crop plants (for example, corn, alfalfa, sunflower, Brassica, soybean, cotton, safflower, peanut, sorghum, wheat, millet, tobacco, etc.). In other embodiments, corn and soybean plants are optimal, and in yet other embodiments corn plants are optimal.

[0065] Other plants of interest include, for example, grain plants that provide seeds of interest, oil-seed plants, and leguminous plants. Seeds of interest include, for example, grain seeds, such as corn, wheat, barley, rice, sorghum, rye, etc. Oil-seed plants include, for example, cotton, soybean, safflower, sunflower, Brassica, maize, alfalfa, palm, coconut, etc. Leguminous plants include beans and peas. Beans include guar, locust bean, fenugreek, soybean, garden beans, cowpea, mungbean, lima bean, fava bean, lentils, chickpea.

[0066] For example, in certain embodiments, maize plants are provided that comprise, in their genome, a recombinant DNA construct comprising a polynucleotide that encodes a polypeptide comprising an amino acid sequence that is at least 80% to about 100% identical to any one of SEQ ID NOS: 1-11, 23-31, 40-299, 563, 565, and 567-573. In certain embodiments, the polypeptide comprising an amino acid sequence that is at least 80% to about 100% identical to the amino acid sequence of any one of SEQ ID NOS: 1-11, 23-31, 40-299, 563, 565, and 567-573 comprises the amino acid sequence set forth in SEQ ID NO: 28. In certain embodiments, the polypeptide comprising an amino acid sequence that is at least 80% to about 100% identical to the amino acid sequence of any one of SEQ ID NOS: 1-11, 23-31, 40-299, 563, 565, and 567-573.

[0067] In other embodiments, maize plants are provided that comprise a genetic modification at a genomic locus that encodes a polypeptide comprising an amino acid sequence that is at least 80% identical to the amino acid sequence of any one of SEQ ID NOS: 1-11, 23-31, 40-299, 563, 565, and 567-573. In certain embodiments, the polypeptide comprising an amino acid sequence that is at least 80% identical to the amino acid sequence of any one of SEQ ID NOS: 1-11, 23-31, 40-299, 563, 565, and 567-573 comprises the amino acid sequence set forth in SEQ ID NO: 28. In certain embodiments, the polypeptide comprising an amino acid sequence that is at least 80% identical to the amino acid sequence of any one of SEQ ID NOS: 1-11, 23-31, 40-299, 563, 565, and 567-573.

### D. Stacking Other Traits of Interest

[0068] In some embodiments, the polynucleotides disclosed herein are engineered into a molecular stack. Thus, the various host cells, plants, plant cells, plant parts, seeds, and/or grain disclosed herein can further comprise one or more traits of interest. In certain embodiments, the host cell, plant, plant part, plant cell, seed, and/or grain is stacked with any combination of polynucleotide sequences of interest in order to create plants with a desired combination of traits. As used herein, the term “stacked” refers to having multiple traits present in the same plant or organism of interest. For example, “stacked traits” may comprise a molecular stack where the sequences are physically adjacent to each other. A trait, as used herein, refers to the phenotype derived from a particular sequence or groups of sequences. In one embodiment, the molecular stack comprises at least one polynucleotide that confers tolerance to glyphosate. Polynucleotides that confer glyphosate tolerance are known in the art.

[0069] In certain embodiments, the molecular stack comprises at least one polynucleotide that confers tolerance to glyphosate and at least one additional polynucleotide that confers tolerance to a second herbicide.

[0070] In certain embodiments, the plant, plant cell, seed, and/or grain having an inventive polynucleotide sequence may be stacked with, for example, one or more sequences that confer tolerance to: an ALS inhibitor; an HPPD inhibitor; 2,4-D; other phenoxy auxin herbicides; aryloxyphenoxypropionate herbicides; dicamba; glufosinate herbicides; herbicides which target the protox enzyme (also referred to as “protox inhibitors”).

[0071] The plant, plant cell, plant part, seed, and/or grain having an inventive polynucleotide sequence can also be combined with at least one other trait to produce plants that further comprise a variety of desired trait combinations. For instance, the plant, plant cell, plant part, seed, and/or grain having an inventive polynucleotide sequence may be stacked with polynucleotides encoding polypeptides having pesticidal and/or insecticidal activity, or a plant, plant cell, plant part, seed, and/or grain having an inventive polynucleotide sequence may be combined with a plant disease resistance gene.

[0072] These stacked combinations can be created by any method including, but not limited to, breeding plants by any conventional methodology, or genetic transformation. If the sequences are stacked by genetically transforming the plants, the polynucleotide sequences of interest can be combined at any time and in any order. The traits can be introduced simultaneously in a co-transformation protocol with the polynucleotides of interest provided by any combination of transformation cassettes. For example, if two sequences will be introduced, the two sequences can be contained in separate transformation cassettes (trans) or contained on the same transformation cassette (cis). Expression of the sequences can be driven by the same promoter or by different promoters. In certain cases, it may be desirable to introduce a transformation cassette that will suppress the expression of the polynucleotide of interest. This may be combined with any combination of other suppression cassettes or overexpression cassettes to generate the desired combination of traits in the plant. It is further recognized that polynucleotide sequences can be stacked at a desired genomic location using a site-specific recombination system. See, for example, WO99/25821, WO99/25854, WO99/25840, WO99/25855, and WO99/25853, all of which are herein incorporated by reference. Any plant having an inventive polynucleotide sequence disclosed herein can be used to make a food or a feed product. Such methods comprise obtaining a plant, explant, seed, plant cell, or cell comprising the polynucleotide sequence and processing the plant, explant, seed, plant cell, or cell to produce a food or feed product.

### II. Methods of Use

### A. Methods for Increasing Yield, and/or Increasing the Activity of Polynucleotides in a Plant

[0073] Provided are methods for increasing yield in a plant, modifying flowering time of a plant, and/or increasing the activity of one or more polynucleotides disclosed herein in a plant comprising introducing into a plant, plant cell, plant part, seed, and/or grain a recombinant DNA construct comprising any of the inventive polynucleotides described herein, whereby the polypeptide is expressed in the plant. Also provided are methods for increasing yield in a plant, modifying flowering time of a plant, and/or increasing the activity in a plant comprising introducing a genetic modification at a genomic locus of a plant that encodes a polypeptide comprising an amino acid sequence that is at least 80%-99% or 100% identical to the amino acid sequence set for in any one of SEQ ID NOS: 1-11, 23-31, 40-299, 563, 565, and 567-573.

[0074] The plant for use in the inventive methods can be any plant species described herein. In certain embodiments, the plant is a grain plant, an oil-seed plant, or leguminous plant. In certain embodiments, the plant is a grain plant such as maize.

[0075] As used herein, “yield” refers to the amount of agricultural production harvested per unit of land and may include reference to bushels per acre of a crop at harvest, as adjusted for grain moisture (e.g., typically 15% for maize). Grain moisture is measured in the grain at harvest. The adjusted test weight of grain is determined to be the weight in pounds per bushel, adjusted for grain moisture level at harvest.

[0076] In certain embodiments yield is measured in plants grown under optimal growth conditions. As used herein, “optimal conditions” refers to plants that are grown under well-watered or non-drought conditions. In certain embodiments, optimal growth conditions are determined based on the yield of the wild-type control plants in the experiment. As used herein, plants are considered to be grown under optimal conditions when the wild-type plant provides at least 75% of the predicted grain yield.

[0077] As used herein, “modifying flowering time” refers to a change in the number of days or growth heat units required for a plant to flower. In certain embodiments, the flowering time of the plant is delayed upon increased expression of the polypeptide. Also contemplated are embodiments in which flowering time is decreased (i.e., less days or growth heat units required for a plant to flower) upon decreased expression of the polypeptide.

[0078] As used herein, increase in photosynthetic activity, refers to any detectable increase in the functional activity of the protein compared to a suitable control. The functional activity may be any known biological property of one or more of the polypeptides disclosed herein and includes, for example, increased formation of protein complexes, modulation of biochemical pathways, and/or increased grain yield.

[0079] Various methods can be used to introduce a sequence of interest into a plant, plant part, plant cell, seed, and/or grain. “Introducing” is intended to mean presenting to the plant, plant cell, seed, and/or grain the inventive polynucleotide or resulting polypeptide in such a manner that the sequence gains access to the interior of a cell of the plant. The methods of the disclosure do not depend on a particular method for introducing a sequence into a plant, plant cell, seed, and/or grain, only that the polynucleotide or polypeptide gains access to the interior of at least one cell of the plant.

[0080] “Stable transformation” is intended to mean that the polynucleotide introduced into a plant integrates into the genome of the plant of interest and is capable of being inherited by the progeny thereof. “Transient transformation” is intended to mean that a polynucleotide is introduced into the plant of interest and does not integrate into the genome of the plant or organism or a polypeptide is introduced into a plant or organism.

[0081] Transformation protocols as well as protocols for introducing polypeptides or polynucleotide sequences into plants may vary depending on the type of plant or plant cell, i.e., monocot or dicot, targeted for transformation.

[0082] In specific embodiments, the polynucleotide sequences disclosed herein can be provided to a plant using a variety of transient transformation methods. Such transient transformation methods include, but are not limited to, the introduction of the encoded protein directly into the plant. Such methods include, for example, microinjection or particle bombardment. See, for example, Crossway et al. (1986) Mol Gen. Genet. 202:179-185; Nomura et al. (1986) Plant Sci. 44:53-58; Hepler et al. (1994) Proc. Natl. Acad. Sci. 91: 2176-2180 and Hush et al. (1994) The Journal of Cell Science 107:775-784, all of which are herein incorporated by reference.

[0083] In other embodiments, the inventive polynucleotides disclosed herein may be introduced into plants by contacting plants with a virus or viral nucleic acids. Generally, such methods involve incorporating a nucleotide construct of the disclosure within a DNA or RNA molecule. It is recognized that the inventive polynucleotide sequence may be initially synthesized as part of a viral polyprotein, which later may be processed by proteolysis in vivo or in vitro to produce the desired recombinant protein. Further, it is recognized that promoters disclosed herein also encompass promoters utilized for transcription by viral RNA polymerases. Methods for introducing polynucleotides into plants and expressing a protein encoded therein, involving viral DNA or RNA molecules, are known in the art. See, for example, U.S. Pat. Nos. 5,889,191, 5,889,190, 5,866,785, 5,589,367, 5,316,931, and Porta et al. (1996) Molecular Biotechnology 5:209-221; herein incorporated by reference.

[0084] Various methods can be used to introduce a genetic modification at a genomic locus that encodes and polypeptide into the plant, plant part, plant cell, seed, and/or grain. In certain embodiments the targeted DNA modification is through a genome modification technique selected from the group consisting of a polynucleotide-guided endonuclease, CRISPR-Cas endonucleases, base editing deaminases, zinc finger nuclease, a transcription activator-like effector nuclease (TALEN), engineered site-specific meganuclease, or Argonaute.

[0085] In some embodiments, the genome modification may be facilitated through the induction of a double-stranded break (DSB) or single-strand break, in a defined position in the genome near the desired alteration. DSBs can be induced using any DSB-inducing agent available, including, but not limited to, TALENs, meganucleases, zinc finger nucleases, Cas9-gRNA systems (based on bacterial CRISPR-Cas systems), guided cpfl endonuclease systems, and the like. In some embodiments, the introduction of a DSB can be combined with the introduction of a polynucleotide modification template.

[0086] A polynucleotide modification template can be introduced into a cell by any method known in the art, such as, but not limited to, transient introduction methods, transfection, electroporation, microinjection, particle mediated delivery, topical application, whiskers mediated delivery, delivery via cell-penetrating peptides, or mesoporous silica nanoparticle (MSN)-mediated direct delivery.

[0087] The polynucleotide modification template can be introduced into a cell as a single stranded polynucleotide molecule, a double stranded polynucleotide molecule, or as part of a circular DNA (vector DNA). The polynucleotide modification template can also be tethered to the guide RNA and/or the Cas endonuclease. Tethered DNAs can allow for co-localizing target and template DNA, useful in genome editing and targeted genome regulation, and can also be useful in targeting post-mitotic cells where function of endogenous HR machinery is expected to be highly diminished (Mali et al. 2013 Nature Methods Vol. 10: 957-963.) The polynucleotide modification template may be present transiently in the cell or it can be introduced via a viral replicon.

[0088] A “modified nucleotide” or “edited nucleotide” refers to a nucleotide sequence of interest that comprises at least one alteration when compared to its non-modified nucleotide sequence. Such “alterations” include, for example: (i) replacement of at least one nucleotide, (ii) a deletion of at least one nucleotide, (iii) an insertion of at least one nucleotide, or (iv) any combination of (i)-(iii).

[0089] The term “polynucleotide modification template” includes a polynucleotide that comprises at least one nucleotide modification when compared to the nucleotide sequence to be edited. A nucleotide modification can be at least one nucleotide substitution, addition or deletion. Optionally, the polynucleotide modification template can further comprise homologous nucleotide sequences flanking the at least one nucleotide modification, wherein the flanking homologous nucleotide sequences provide sufficient homology to the desired nucleotide sequence to be edited.

[0090] The process for editing a genomic sequence combining DSB and modification templates generally comprises: providing to a host cell, a DSB-inducing agent, or a nucleic acid encoding a DSB-inducing agent, that recognizes a target sequence in the chromosomal sequence and is able to induce a DSB in the genomic sequence, and at least one polynucleotide modification template comprising at least one nucleotide alteration when compared to the nucleotide sequence to be edited. The polynucleotide modification template can further comprise nucleotide sequences flanking the at least one nucleotide alteration, in which the flanking sequences are substantially homologous to the chromosomal region flanking the DSB.

[0091] The endonuclease can be provided to a cell by any method known in the art, for example, but not limited to, transient introduction methods, transfection, microinjection, and/or topical application or indirectly via recombination constructs. The endonuclease can be provided as a protein or as a guided polynucleotide complex directly to a cell or indirectly via recombination constructs. The endonuclease can be introduced into a cell transiently or can be incorporated into the genome of the host cell using any method known in the art. In the case of a CRISPR-Cas system, uptake of the endonuclease and/or the guided polynucleotide into the cell can be facilitated with a Cell Penetrating Peptide (CPP) as described in WO2016073433 published May 12, 2016.

[0092] In addition to modification by a double strand break technology, modification of one or more bases without such double strand break are achieved using base editing technology, see e.g., Gaudelli et al., (2017) Programmable base editing of A*T to G*C in genomic DNA without DNA cleavage. Nature 551(7681):464-471; Komor et al., (2016) Programmable editing of a target base in genomic DNA without double-stranded DNA cleavage, Nature 533(7603):420-4.

[0093] These fusions contain dCas9 or Cas9 nickase and a suitable deaminase, and they can convert e.g., cytosine to uracil without inducing double-strand break of the target DNA. Uracil is then converted to thymine through DNA replication or repair. Improved base editors that have targeting flexibility and specificity are used to edit endogenous locus to create target variations and improve grain yield. Similarly, adenine base editors enable adenine to inosine change, which is then converted to guanine through repair or replication. Thus, targeted base changes i.e., C⋅G to T⋅A conversion and A⋅T to G⋅C conversion at one more locations made using appropriate site-specific base editors.

[0094] In an embodiment, base editing is a genome editing method that enables direct conversion of one base pair to another at a target genomic locus without requiring double-stranded DNA breaks (DSBs), homology-directed repair (HDR) processes, or external donor DNA templates. In an embodiment, base editors include (i) a catalytically impaired CRISPR-Cas9 mutant that are mutated such that one of their nuclease domains cannot make DSBs; (ii) a single-strand-specific cytidine/adenine deaminase that converts C to U or A to G within an appropriate nucleotide window in the single-stranded DNA bubble created by Cas9; (iii) a uracil glycosylase inhibitor (UGI) that impedes uracil excision and downstream processes that decrease base editing efficiency and product purity; and (iv) nickase activity to cleave the non-edited DNA strand, followed by cellular DNA repair processes to replace the G-containing DNA strand.

[0095] As used herein, a “genomic region” is a segment of a chromosome in the genome of a cell that is present on either side of the target site or, alternatively, also comprises a portion of the target site. The genomic region can comprise at least 5-10, 5-15, 5-20, 5-25, 5-30, 5-35, 5-40, 5-45, 5-50, 5-55, 5-60, 5-65, 5-70, 5-75, 5-80, 5-85, 5-90, 5-95, 5-100, 5-200, 5-300, 5-400, 5-500, 5-600, 5-700, 5-800, 5-900, 5-1000, 5-1100, 5-1200, 5-1300, 5-1400, 5-1500, 5-1600, 5-1700, 5-1800, 5-1900, 5-2000, 5-2100, 5-2200, 5-2300, 5-2400, 5-2500, 5-2600, 5-2700, 5-2800. 5-2900, 5-3000, 5-3100 or more bases such that the genomic region has sufficient homology to undergo homologous recombination with the corresponding region of homology.

[0096] TAL effector nucleases (TALEN) are a class of sequence-specific nucleases that can be used to make double-strand breaks at specific target sequences in the genome of a plant or other organism. (Miller et al. (2011) Nature Biotechnology 29:143-148).

[0097] Endonucleases are enzymes that cleave the phosphodiester bond within a polynucleotide chain. Endonucleases include restriction endonucleases, which cleave DNA at specific sites without damaging the bases, and meganucleases, also known as homing endonucleases (HEases), which like restriction endonucleases, bind and cut at a specific recognition site, however the recognition sites for meganucleases are typically longer, about 18 bp or more (patent application PCT/US12/30061, filed on Mar. 22, 2012). Meganucleases have been classified into four families based on conserved sequence motifs, the families are the LAGLIDADG, GIY-YIG, H—N—H, and His-Cys box families. These motifs participate in the coordination of metal ions and hydrolysis of phosphodiester bonds. HEases are notable for their long recognition sites, and for tolerating some sequence polymorphisms in their DNA substrates. The naming convention for meganuclease is similar to the convention for other restriction endonuclease. Meganucleases are also characterized by prefix F-, I-, or PI- for enzymes encoded by free-standing ORFs, introns, and inteins, respectively. One step in the recombination process involves polynucleotide cleavage at or near the recognition site. The cleaving activity can be used to produce a double-strand break. For reviews of site-specific recombinases and their recognition sites, see, Sauer (1994) Curr Op Biotechnol 5:521-7; and Sadowski (1993) FASEB 7:760-7. In some examples the recombinase is from the Integrase or Resolvase families.

[0098] Zinc finger nucleases (ZFNs) are engineered double-strand break inducing agents comprised of a zinc finger DNA binding domain and a double-strand-break-inducing agent domain. Recognition site specificity is conferred by the zinc finger domain, which typically comprising two, three, or four zinc fingers, for example having a C2H2 structure, however other zinc finger structures are known and have been engineered. Zinc finger domains are amenable for designing polypeptides which specifically bind a selected polynucleotide recognition sequence. ZFNs include an engineered DNA-binding zinc finger domain linked to a non-specific endonuclease domain, for example nuclease domain from a Type IIs endonuclease such as FokI. Additional functionalities can be fused to the zinc-finger binding domain, including transcriptional activator domains, transcription repressor domains, and methylases. In some examples, dimerization of nuclease domain is required for cleavage activity. Each zinc finger recognizes three consecutive base pairs in the target DNA. For example, a 3 finger domain recognized a sequence of 9 contiguous nucleotides, with a dimerization requirement of the nuclease, two sets of zinc finger triplets are used to bind an 18 nucleotide recognition sequence.

[0099] Genome editing using DSB-inducing agents, such as Cas9-gRNA complexes, has been described, for example in U.S. Patent Application US 2015-0082478 A1, published on Mar. 19, 2015, WO2015/026886 A1, published on Feb. 26, 2015, WO2016007347, published on Jan. 14, 2016, and WO201625131, published on Feb. 18, 2016, all of which are incorporated by reference herein.

[0100] A guide polynucleotide/Cas endonuclease complex can cleave one or both strands of a DNA target sequence. A guide polynucleotide/Cas endonuclease complex that can cleave both strands of a DNA target sequence typically comprise a Cas protein that has all of its endonuclease domains in a functional state (e.g., wild type endonuclease domains or variants thereof retaining some or all activity in each endonuclease domain). Non-limiting examples of Cas9 nickases suitable for use herein are disclosed in U.S. Patent Appl. Publ. No. 2014/0189896, which is incorporated herein by reference.

[0101] Other Cas endonuclease systems have been described in PCT patent applications PCT/US16/32073, filed May 12, 2016 and PCT/US16/32028 filed May 12, 2016, both applications incorporated herein by reference.

[0102] The terms “target site”, “target sequence”, “target site sequence, “target DNA”, “target locus”, “genomic target site”, “genomic target sequence”, “genomic target locus” and “protospacer”, are used interchangeably herein and refer to a polynucleotide sequence such as, but not limited to, a nucleotide sequence on a chromosome, episome, or any other DNA molecule in the genome (including chromosomal, choloroplastic, mitochondrial DNA, plasmid DNA) of a cell, at which a guide polynucleotide/Cas endonuclease complex can recognize, bind to, and optionally nick or cleave. The target site can be an endogenous site in the genome of a cell, or alternatively, the target site can be heterologous to the cell and thereby not be naturally occurring in the genome of the cell, or the target site can be found in a heterologous genomic location compared to where it occurs in nature. As used herein, terms “endogenous target sequence” and “native target sequence” are used interchangeable herein to refer to a target sequence that is endogenous or native to the genome of a cell and is at the endogenous or native position of that target sequence in the genome of the cell. Cells include, but are not limited to, human, non-human, animal, bacterial, fungal, insect, yeast, non-conventional yeast, and plant cells as well as plants and seeds produced by the methods described herein. An “artificial target site” or “artificial target sequence” are used interchangeably herein and refer to a target sequence that has been introduced into the genome of a cell. Such an artificial target sequence can be identical in sequence to an endogenous or native target sequence in the genome of a cell but be located in a different position (i.e., a non-endogenous or non-native position) in the genome of a cell.

[0103] An “altered target site”, “altered target sequence”, “modified target site”, “modified target sequence” are used interchangeably herein and refer to a target sequence as disclosed herein that comprises at least one alteration when compared to non-altered target sequence. Such “alterations” include, for example: (i) replacement of at least one nucleotide, (ii) a deletion of at least one nucleotide, (iii) an insertion of at least one nucleotide, or (iv) any combination of (i)-(iii).

[0104] Methods for “modifying a target site” and “altering a target site” are used interchangeably herein and refer to methods for producing an altered target site.

[0105] The length of the target DNA sequence (target site) can vary, and includes, for example, target sites that are at least 12, 13, 14, 15, 16, 17, 18, 19, 20, 21, 22, 23, 24, 25, 26, 27, 28, 29, 30 or more nucleotides in length. It is further possible that the target site can be palindromic, that is, the sequence on one strand reads the same in the opposite direction on the complementary strand. The nick/cleavage site can be within the target sequence or the nick/cleavage site could be outside of the target sequence. In another variation, the cleavage could occur at nucleotide positions immediately opposite each other to produce a blunt end cut or, in other Cases, the incisions could be staggered to produce single-stranded overhangs, also called “sticky ends”, which can be either 5′ overhangs, or 3′ overhangs. Active variants of genomic target sites can also be used. Such active variants can comprise at least 65%, 70%, 75%, 80%, 85%, 90%, 91%, 92%, 93%, 94%, 95%, 96%, 97%, 98%, 99% or more sequence identity to the given target site, wherein the active variants retain biological activity and hence are capable of being recognized and cleaved by an Cas endonuclease. Assays to measure the single or double-strand break of a target site by an endonuclease are known in the art and generally measure the overall activity and specificity of the agent on DNA substrates containing recognition sites.

[0106] A “protospacer adjacent motif” (PAM) herein refers to a short nucleotide sequence adjacent to a target sequence (protospacer) that is recognized (targeted) by a guide polynucleotide/Cas endonuclease system described herein. The Cas endonuclease may not successfully recognize a target DNA sequence if the target DNA sequence is not followed by a PAM sequence. The sequence and length of a PAM herein can differ depending on the Cas protein or Cas protein complex used. The PAM sequence can be of any length but is typically 1, 2, 3, 4, 5, 6, 7, 8, 9, 10, 11, 12, 13, 14, 15, 16, 17, 18, 19 or 20 nucleotides long.

[0107] The terms “targeting”, “gene targeting” and “DNA targeting” are used interchangeably herein. DNA targeting herein may be the specific introduction of a knock-out, edit, or knock-in at a particular DNA sequence, such as in a chromosome or plasmid of a cell. In general, DNA targeting can be performed herein by cleaving one or both strands at a specific DNA sequence in a cell with an endonuclease associated with a suitable polynucleotide component. Such DNA cleavage, if a double-strand break (DSB), can prompt NHEJ or HDR processes which can lead to modifications at the target site.

[0108] A targeting method herein can be performed in such a way that two or more DNA target sites are targeted in the method, for example. Such a method can optionally be characterized as a multiplex method. Two, three, four, five, six, seven, eight, nine, ten, or more target sites can be targeted at the same time in certain embodiments. A multiplex method is typically performed by a targeting method herein in which multiple different RNA components are provided, each designed to guide an guidepolynucleotide/Cas endonuclease complex to a unique DNA target site.

[0109] The terms “knock-out”, “gene knock-out” and “genetic knock-out” are used interchangeably herein. A knock-out represents a DNA sequence of a cell that has been rendered partially or completely inoperative by targeting with a Cas protein; such a DNA sequence prior to knock-out could have encoded an amino acid sequence, or could have had a regulatory function (e.g., promoter), for example. A knock-out may be produced by an indel (insertion or deletion of nucleotide bases in a target DNA sequence through NHEJ), or by specific removal of sequence that reduces or completely destroys the function of sequence at or near the targeting site.

[0110] The guide polynucleotide/Cas endonuclease system can be used in combination with a co-delivered polynucleotide modification template to allow for editing (modification) of a genomic nucleotide sequence of interest. (See also U.S. Patent Application US 2015-0082478 A1, published on Mar. 19, 2015 and WO2015/026886 A1, published on Feb. 26, 2015, both are hereby incorporated in its entirety by reference.)

[0111] The terms “knock-in”, “gene knock-in, “gene insertion” and “genetic knock-in” are used interchangeably herein. A knock-in represents the replacement or insertion of a DNA sequence at a specific DNA sequence in cell by targeting with a Cas protein (by HR, wherein a suitable donor DNA polynucleotide is also used). Examples of knock-ins are a specific insertion of a heterologous amino acid coding sequence in a coding region of a gene, or a specific insertion of a transcriptional regulatory element in a genetic locus.

[0112] The following are examples of specific embodiments of some aspects of the invention. The examples are offered for illustrative purposes only and are not intended to limit the scope of the invention in any way.

### Example 1

### Protein-Protein Interactions with ZMM28

[0113] This example demonstrates the interaction of other polypeptides with Zmm28 transcription factor (SEQ ID NO: 562). MADS-box transcription factors associate as homo- or hetero-dimers to bind CArG box elements and subsequently modulate target gene expression. To identify protein-protein interaction partners that potentially interact with native ZMM28 protein, Yeast Two-Hybrid (Y2H) screening was performed with a B73 immature ear library resulting in the identification of six potential MADS box protein-protein interaction partners (Table 2a).

[0114] Since native zmm28 does not express at early growth stages, protein-protein interaction partners contributing to the transgenic maize events phenotypes in seedlings and young leaves were assayed using Y2H screening of a PH184C seedling (V2-V3) library and a B73 V3-V7 leaf library. Nine total interacting proteins, none of which are MADS box proteins, were identified from the two libraries.

[0115] Potential interaction partners of ZMM28 were further tested in vivo with a bimolecular fluorescence complementation (BiFC) assay. Following transfection of maize protoplasts, fluorescence was measured indicating interaction between nGFP-Prey and cGFP-ZMM28 (Bait). As BiFC is prone to false-positive self-assembly independent of protein-protein interaction, flow cytometry was used to quantify the BiFC signal and reduce the occurrence of false positives. All signal comparisons were made to a negative control providing a baseline for self-assembly. The control was created by deleting 47 amino acids from the leucine zipper-like K-domain of ZMMADSL6, a protein interaction partner of ZMM28 identified from bioinformatics prediction and Y2H experiment. Truncated ZMMADSL6 (ZMMADSL6-MUT) had significantly reduced interaction with ZMM28 relative to WT ZMMADSL6 while still maintaining nuclear localization. Of the 12 tested protein interactions, eight were confirmed via the BiFC assay with almost half the interactions confirmed positive in both BiFC and Y2H assays (Table 2a). Table 2: ZMM28 protein-protein interactions, transcription, direct targets.

TABLE 2a
Transgenic protein-protein interaction partners.

| ID | Description | Clade | Expression | Y2H | BiFC | HY1H | Sum |
|---|---|---|---|---|---|---|---|
| Zm00001d041781 | ZmZAG2 | AG | 0.001 | + | − | − | + |
| Zm00001d017614 | ZmMADS6 | AGL6 | 0.002 | + | + | + | +++ |
| Zm00001d018667 | ZmZAPL | AP1-FULL | 0.001 | + | + | + | +++ |
| Zm00001d022088 | ZMM28 | AP1 FULL | 1.000 | − | + | − | + |
| Zm00001d028217 | ZmM5 | SEP | 0.005 | + | + | − | ++ |
| Zm00001d031620 | ZmMADSL6 | SEP | 0.007 | + | + | + | +++ |
| Zm00001d021057 | ZmMADS7-LIKE | SEP | 0.002 | + | − | − | + |
| Zm00001d034047 | ZmMADS24 | SEP | 0.007 | − | + | − | + |
| Zm00001d044899 | ZmMADS47-LIKE | SVP | 0.240 | − | − | + | + |
| Zm00001d027957 | ZmM47 | SVP | 1.862 | − | + | + | ++ |
| Zm00001d037925 | ZmSF2 | N/A | 0.534 | + | − | + | ++ |
| Zm00001d022164 | ZmSFT-LIKE | N/A | 0.788 | + | + | + | +++ |

TABLE 2b
Gene ontology enrichment from RNA-seq data

| | | | DEG V6 | Number | | |
|---|---|---|---|---|---|---|
| GO terms | Ontology¹ | Description | Leaf² | in Ref.³ | p-value⁴ | FDR⁵ |
| GO:0015979 | P | photosynthesis | 12 | 94 | 3.10E−10 | 1.40E−07 |
| GO:0009765 | P | photosynthesis, light harvesting | 7 | 25 | 4.50E−09 | 1.10E−06 |
| GO:0019684 | P | photosynthesis, light reaction | 7 | 40 | 1.50E−07 | 2.40E−05 |
| GO:0033013 | P | tetrapyrrole metabolic process | 5 | 39 | 4.50E−05 | 0.0042 |
| GO:0034357 | C | photosynthetic membrane | 7 | 57 | 1.90E−06 | 7.20E−05 |
| GO:0044436 | C | thylakoid part | 6 | 34 | 1.10E−06 | 7.20E−05 |
| GO:0009579 | C | thylakoid | 7 | 60 | 2.70E−06 | 7.20E−05 |
| GO:0004222 | F | metalloendopeptidase activity | 5 | 48 | 0.00012 | 0.038 |
| GO:0006091 | P | generation of precursor metabolites | 14 | 315 | 6.70E−06 | 0.00078 |
| | | and energy | | | | |
| GO:0005975 | P | carbohydrate metabolic process | 20 | 788 | 0.00028 | 0.022 |
| GO:0018130 | P | heterocycle biosynthetic process | 6 | 95 | 0.00043 | 0.028 |

TABLE 2d
Summary results demonstrating ZMM28 interaction with direct target promoters.

| | | Pathway | | Bound in | Log₂ |
|---|---|---|---|---|---|
| ID | Description | (Discovery) | CArG | (assay) | Expression [symbol] |
| Zm00001d053787 | lhca1l, photosystem I light | photosynthesis, | 3 | Protoplast | 0.51* |
| | harvesting complex | light harvesting | | | |
| | gene 1-like | (RNAseq) | | | |
| Zm00001d005814 | lhca5l, photosystem I light | photosynthesis, | 3 | Protoplast | 0.28* |
| | harvesting complex | light harvesting | | | |
| | gene 6-like | (RNAseq) | | | |
| Zm00001d027422 | Photosystem II PsbP, oxygen | Photosynthesis | 3 | Protoplast | 0.24* |
| | evolving complex member | (RNAseq) | | | |
| | (ps2oe) | | | | |
| Zm00001d007267 | lhcb5, light-harvesting | photosynthesis, | 3 | HY1H | 0.22* |
| | complex II chlorophyll a/b | light harvesting | | | |
| | binding protein S | (RNAseq) | | | |
| Zm00001d027694 | Solanesyl diphosphate | Photosynthesis | 3 | Protoplast | 0.2* |
| | synthase 2 chloroplastic | (RNAseq) | | | |
| | (sds) | | | | |
| Zm00001d038163 | Pyruvate, phosphate | Photosynthesis/ | 2 | Protoplast | 0.04 |
| | dikinase | pyruvate | | | |
| | (chloroplastic/cytoplasmic) | metabolism | | | |
| | (ppdk) | (RNAseq) | | | |
| Zm00001d016973 | GID2-like F-box protein | hormone signaling | 2 | HY1H | 0.12 |
| | (gid2) | (ChIPseq) | | | |
| Zm00001d003911 | AFB2-like/TIR1-like (ofb2) | hormone signaling | 5 | HY1H | 0.00 |
| | | (ChIPseq) | | | |
| Zm00001d030995 | b2IP111, CAMP-response | transcription | 5 | Protoplast | 0.23 |
| | element binding protein- | factor activity | | | |
| | related [symbol] | (ChIPseq) | | | |

[symbol]

indicates data missing or illegible when filed

[0116] Table 2(a) provides a summary of protein-protein interactions with potential contribution to transgenically expressed zmm28. Expression values are from RNA-seq from transgenic V6 maize leaves and are normalized to zmm28. A “+” was listed for protein-interaction predictions based on yeast two-hybrid (Y2H); maize protoplast BiFC; and in heterodimer yeast one-hybrid (HY1H). (b) GO-term enrichment for transcriptomic analysis of DP202216 V6 leaf tissue. Photosynthesis related includes GO Terms 0015979, 0009765, 0019684, 0006091, 0033013, 0034357, 0044436, and 0009579. (d) Summary of promoter direct target analysis and expression in V6 leaves of event DP202216. 1 P=biological process, F=molecular function, C=cellular component. ² Number of genes associated with each GO term that are differentially expressed between control and event DP202216 V6 leaf, DEG=differentially expressed gene. ³ Total number of genes in each GO category expressed in V6 leaf total detected transcripts. ⁴ Fisher's exact test for GO term enrichment. ⁵ False discovery rate. ⁶ V6 Leaf. * Statistically significant (adjusted p<0.05).

TABLE 2(c)
Differential Expression Values for Genes Involved

log2 fold
change

Photosynthesis related

| | |
|---|---|
| lhcb9 | 0.7188 |
| lhca1l | 0.5080 |
| GRMZM2G436986 | 0.3699 |
| GRMZM2G005433 | 0.3474 |
| GRMZM2G083016 | 0.3327 |
| lhac6l | 0.3099 |
| GRMZM2G059083 | 0.2878 |
| psbs1 | 0.2849 |
| GRMZM2G103101 | 0.2754 |
| GRMZM2G117412 | 0.2752 |
| chlh1 | 0.2710 |
| fdx2 | 0.2506 |
| GRMZM2G089136 | 0.2431 |
| ps2oe | 0.2386 |
| GRMZM2G033885 | 0.2353 |
| lhcb5 | 0.2200 |
| GRMZM2G016066 | 0.2139 |
| sds | 0.2042 |
| ris2 | 0.2018 |
| GRMZM2G064302 | 0.1902 |
| GRMZM2G168143 | 0.1652 |
| GRMZM2G023528 | 0.1622 |
| GRMZM2G027955 | 0.1579 |
| GRMZM2G113325 | 0.1219 |
| GRMZM2G127421 | −0.2992 |
| GRMZM2G359127 | −0.3116 |

Carbohydrate metabolic process

| | |
|---|---|
| GRMZM2G017186 | 0.6168 |
| GRMZM2G083016 | 0.2431 |
| GRMZM2G026807 | 0.2701 |
| GRMZM2G121128 | 0.2688 |
| gbss1b | 0.2450 |
| GRMZM2G089136 | 0.2431 |
| GRMZM2G306732 | 0.2312 |
| GRMZM2G064302 | 0.1902 |
| sps2 | 0.1834 |
| GRMZM2G023528 | 0.1622 |
| GRMZM2G125977 | 0.1599 |
| GRMZM2G027955 | 0.1579 |
| pgm2 | 0.1495 |
| GRMZM2G052546 | 0.1399 |
| mdh6 | 0.0968 |
| GRMZM2G005493 | −0.1821 |
| umc2230 | −0.2250 |
| GRMZM2G122431 | −0.6249 |
| GRMZM2G082034 | −0.8355 |
| GRMZM2G347708 | −0.9058 |

Heterocycle biosynthetic process

| | |
|---|---|
| thi1 | 0.3236 |
| GRMZM2G177412 | 0.3099 |
| chlh1 | 0.2710 |
| GRMZM2G027663 | 0.2200 |
| GRMZM2G023528 | 0.1622 |
| GRMZM2G113325 | 0.1219 |

Metalloendopeptidase activity

| | |
|---|---|
| GRMZM2G044697 | 0.2005 |
| GRMZM2G087598 | 0.1873 |
| prep2 | 0.1714 |
| GRMZM2G111200 | 0.1703 |
| GRMZM2G163193 | 0.1281 |

[0117] Pathway analysis of differentially expressed gene transcripts are shown above. Log 2 fold change heat maps of differentially expressed genes functioning in enriched pathways in event DP202216 V6 leaf tissue.

### Example 2

### Identification of Direct Interacting Partners

[0118] Yeast two-hybrid assay. A commercially available yeast two-hybrid system (Clontech (USA)/Takara (Japan) was used to discover and test for potential protein interaction partners with ZMM28. Three maize cDNA prey libraries were constructed from B73 V12-V14 immature ear, PH184C V2-V3 whole seedling, and B73 V3-V7 leaf RNA. The cDNA libraries were generated using SMART technology and co-transformed with linearized pGADT7-Rec into Yeast Strain Y187. At least one million prey clones from each library were mated to a ZMM28 bait strain. Mating was continued until zygotes could be observed using a light microscope and then plated on QDO/-Ade/-His/-Leu/-Trp and incubated at 30° C. for 5 days. Identified protein interaction partners were re-transformed into the Y2H system for confirmation testing.

[0119] Bimolecular fluorescence complementation (BiFC). Coding sequences for candidate protein-protein interaction partners to ZMM28 were synthesized by GenScript (USA) and placed under the control of the ZmGos2 promoter with a ZmUbi intron 1. The coding sequences were translationally fused to the C-terminal or N-terminal part of the monomeric Ac-GFP1 (Clontech, USA/Takara, Japan) with a 30× Glutamine linker. ZMMADSL6 was selected as a positive control in the BiFC assay as it was confirmed to interact with ZMM28 by Y2H. A truncated version of ZMMADSL6 without the protein interaction domain (a leucine zipper like region in the K-domain) was generated as a negative control.

[0120] Maize seedlings were germinated and grown in Fafard Super Fine Germination Mix for 6 days in a lighted growth chamber (30° C., 60% RH, 24 h light) and were transferred to a dark growth chamber (30° C., 60% RH, 0 h light) and grown for an additional 4 days to V1. Seedlings were sub-irrigated with deionized water. Maize protoplasts were isolated from these seedlings and were transiently transformed by PEG-mediated transfection as described by Yoo et al.63 with the addition of 0.6 M mannitol in the enzyme, WI, W5 and MMG solutions. Protoplasts were transfected with 10 pmol bait+10 pmol prey plasmid DNA per 3×104 cells. Protoplasts were incubated on a 12-well (1 mL WI) plate for 20 hours at RT before samples were analyzed.

[0121] BiFC signals were detected by flow cytometry performed using an Attune™ Flow Cytometer (Thermo Fisher Scientific, Waltham, Mass., USA) with a Blue/Violet configuration (488 nm, 20 mW laser and a 405 nm, 50 mW laser). Protoplasts were first gated (R1) by forward scatter (FSC) and side scatter (SCC) to identify 10,000 intact cells (events) and subsequently analyzed for fluorescence emission measured on BL1 (530/30 nm band pass filter) and BL2 (574/26 nm band pass filter) to distinguish between cells exhibiting the BiFC signal (R2) and auto-fluorescence. At least two independent experiments were performed for each protein interaction test with the positive and negative controls present in every experiment. All experiments were designed and analyzed as single factor randomized complete blocks with n=4. Significant differences were determined by analysis of variance with P<0.05 comparing protein interaction partners to the truncated ZMMADSL6 (ZMMADSL6-MUT) negative control. Western blots were used to confirm expression in cells transfected with the negative control ZMMADSL6-MUT (prey) and ZMM28 (bait).

[0122] RNA-Seq of ZmGos2-zmm28 and control and data analysis. DP202216 was selected for in-depth molecular analysis due to its more favorable insertion region. RNA-Seq libraries were constructed from four biological replicates of control and DP202216 youngest fully expanded leaves at V6 stage. Sequencing was performed on an Illumina HiSeq2500 (Illumina, Inc., USA) with a total read count of 154 million, and a minimum of 12 million reads per sample. RNA-Seq data were aligned to a proprietary maize B73 reference genome using Bowtie 2. Overall loci abundances were estimated using the expected fragment counts metric computed by RSEM65. Samples were vetted for quality by “Robust Principal Components based on Projection Pursuit (PP): GRID search Algorithm” in the “Scalable Robust Estimators with High Breakdown Point” R package [https://cran.r-project.org/package=rrcov]. Fold change was computed and hypothesis tests for differential expression were run using DESeq2, which fits the following model:
[0123] Kᵢⱼ˜NB (pᵢⱼ, αᵢ)=
[0124] μᵢⱼ=sⱼgᵢⱼ
[0125] log₂ qᵢⱼ=x_{j.}βₜ

[0126] Where Kᵢⱼ is the observed count for gene i in sample j following a Negative Binomial distribution, (μᵢⱼ, αᵢ, sⱼ, qᵢⱼ) are all parameters fit to the data (see citation), x_{j.} is 1 if sample j is transgenic and 0 if it is control and βᵢ contains the log₂ fold changes for gene i across all high-nitrogen leaf samples.

[0127] All genes in the proprietary reference genome were converted to public gene model identifiers. The DEGs were then annotated with Gene Ontology terms and differential gene set enrichment was done comparing to the total publicly mapped transcript set for the entire V6 leaf data set using AgriGO.

[0128] Chromatin immunoprecipitation and sequencing (ChIP-seq) data analysis. Chromatin immunoprecipitation (ChIP) was performed in duplicate on the youngest fully expanded leaf from V4 control and DP202216 maize plants using an anti-ZMM28 antibody (R743); ChIP without antibody was included as a control for each sample. Sequencing was performed on an Illumina HiSeq2500 (Illumina, Inc., USA) with a total read count of 461 million, with a minimum of 26 million reads per sample. ChIP-Seq reads were aligned to a proprietary maize B73 reference genome using Bowtie 2. Alignments were then fed to MACS 2.071 in order to detect differential binding in the transgenic samples. Reproducible peaks were then selected using Irreproducible Discovery Rate (IDR) analysis.

TABLE 3
Maize protoplast Bimolecular Fluorescence Complementation assay summary

| | | | Positive | | | | | |
|---|---|---|---|---|---|---|---|---|
| | | | control cell | | GOI cell | | | |
| | | Negative | count | | count | | | |
| | | control | (Positive vs. | | (GOI vs. | | GOI vs. | |
| | Protein | cell | negative p | | negative p | | positive | |
| GOI ID | description | count | value) | | value) | | (p-value) | Summary |
| Zm00001d041781 | ZmZAG2 | 65 | 155 | (0.027) | 125 | (0.053) | 0.195 | − |
| Zm00001d017614 | ZmMADS6 | 375 | 1589 | (0.002) | 1899 | (0.002) | 0.146 | + |
| Zm00001d018667 | ZmZAPL | 491 | 1538 | (0.037) | 2161 | (0.010) | 0.285 | + |
| Zm00001d022088 | ZMM28 | 483 | 878 | (0.010) | 1014 | (0.034) | 0.429 | + |
| Zm00001d028217 | ZmM5 | 2085 | 4728 | (0.007) | 4512 | (0.004) | 0.675 | + |
| Zm00001d031620 | ZmMADSL6 | 2396 | N/A | (N/A) | 4059 | (0.002) | N/A | + |
| Zm00001d021057 | ZmMADS7- | 421 | 1321 | (0.006) | 438 | (0.427) | 0.010 | − |
| | LIKE | | | | | | | |
| Zm00001d034047 | ZmMADS24 | 586 | 2024 | (0.044) | 2099 | (0.035) | 0.764 | + |
| Zm00001d044899 | ZmMADS47- | 483 | 878 | (0.010) | 254 | (0.047) | 0.006 | − |
| | LIKE | | | | | | | |
| Zm00001d027957 | ZmM47 | 483 | 878 | (0.010) | 1085 | (0.005) | 0.107 | + |
| Zm00001d037925 | ZmSF2 | 483 | 878 | (0.010) | 715 | (0.077) | 0.363 | − |
| Zm00001d022164 | ZmSFT-LIKE | 421 | 1321 | (0.006) | 2328 | (0.016) | 0.016 | + |

[0129] Values represent BiFC positive cell counts from selected gate strategies out of 10,000 cells in representative flow cytometry experiments. Negative- and positive-control cell counts represent fluorescent cells in protoplast populations co-transfected with BiFC fusion constructs of truncated ZmMADSL6 and ZMM28 or full length ZmMADSL6 and ZMM28, respectively. GOI=gene of interest. +/− indicates whether the BiFC assay was concluded to be positive (+) or negative (−) based on the p-value calculations.

### Example 3

### Direct-Target Analysis

[0130] This example demonstrates the analysis behind identification of the direct targets of Zmm28. To identify genes directly modulated by transgenic ZMM28 and their associated pathways, genomic sequences directly bound by ZMM28 were recovered from leaves of control and DP202216 plants at the V4 stage, at which time no detectable native ZMM28 protein is produced, and analyzed by chromatin immunoprecipitation and sequencing (ChIP-Seq). In addition, putative direct targets of the transgenic ZMM28 were identified from CArG-motif enrichment of the promoters from the strong differentially regulated DEGs in the transcriptome experiment.

[0131] Two in-cell assays were used to collectively validate candidate direct target promoters identified from above two experiments. A heterodimer Yeast One-Hybrid (HY1H) assay analyzed the capability of ZMM28 and one of its protein-protein interaction partners to directly bind a promoter. Additionally, V2 etiolated maize protoplast cells were used in a protoplast direct-target assay using a ZsGreen1 reporter to detect ZMM28 interactions with promoters. The HY1H assay provided predetermined heterodimer interaction partners while the maize protoplast direct-target assay potentially tested ZMM28 homodimers or heterodimers, forming between native protein-protein interaction partners. Promoters of key photosynthetic pathway components were bound by ZMM28, as were promoters of gibberellin and auxin receptor genes which are responsible for sensing these phytohormones (Table 2d).

[0132] Potential direct target genes (directly bound by the ZMM28 transcription factor) in V4 leaf ChIP-Seq data and select RNA-seq DEG candidates which contain CArG-boxes in the 3 kb upstream of the coding sequence were then screened based on potential function. Promoters of genes with known functional relevance and identifiable CArG sequences were synthesized (Genscript, USA) for direct target assays. Synthesized sequences were cloned into pAbAi (Clontech, USA/TAKARA, Japan) for inclusion in Yeast One-Hybrid assays with ZMM28 and Heterodimer Yeast One-Hybrid assays with ZMM28 and ZMM28 protein-protein interaction partners. Promoter sequences were integrated into the Yeast One-Hybrid Gold strain and individually transformed with a ZMM28-prey plasmid to test for protein-DNA interactions per the Yeast One-Hybrid manual. Heterodimer Yeast One-Hybrid was similarly performed, but including ZMM28 encoded on a Yeast Two-Hybrid bait plasmid (pGBK-T7) and ZMM28 protein-protein interaction partners encoded on a prey (pGAD-T7) plasmid.

[0133] Plant cell-based direct target assays were conducted in maize protoplasts. Protoplasts were isolated and transfected as described above. Reporter constructs consisted of the synthesized promoter sequences identified above transcriptionally fused to a ZsGreen1 (Clontech, USA/TAKARA, Japan) coding sequence followed by a pinII terminator. Effector constructs comprised a maize Gos2 promoter followed by a maize ZmUbi intron driving an effector protein coding sequence. Effector proteins were ZMM28, ZMM28 translationally fused to a 5×VP16 transcriptional activation domain, or β-glucuronidase as a negative control. Protoplasts were evaluated with flow cytometry with similar methodology to above.

### Example 4

### Transcriptome Analysis to Identify Differentially Expressed Genes

[0134] This example demonstrates identification of several differentially expressed genes in plants expressing Zmm28 transgenically. Transcriptome analysis was conducted to identify differentially-expressed genes (DEGs) and their associated pathways that could provide a possible molecular basis for the previously described increased photosynthesis, N uptake, and plant growth. For simplicity, RNA-seq analysis was focused on V6 leaves from DP202216 and control plants. Results of this analysis identified 192 up-regulated and 64 down-regulated transcripts in DP202216 leaves as compared to the control leaf data (Table 3). CArG box sequences were contained within 3 kb upstream of their promoters in 76% of the DEGs, relative to 26-28% of DEGs from two over-expressed non-MADS transcription factors over a total of four experiments. These results suggest that many of the DEGs may be directly regulated by transgenic ZMM28 binding to their promoters at the V6 stage.

[0135] To further gain a global view of the differentially-expressed gene (DEG) function, Gene Ontology (GO) enrichment analysis was conducted and 11 GO terms were identified in the V6 leaf DEG dataset (Table 2b,c). Photosynthesis, generation of precursor metabolites and energy, as well as carbohydrate metabolic processes were the three main GO terms identified, all of which could contribute to promote plant growth and development. These results are consistent with the measured phenotypes of ZmGos2-zmm28 plants and suggest that photosynthesis and carbon assimilation-related genes expression are responsible for the measured grain yield increase.

[0136] Polynucleotide sequences encoding a polypeptide represented by one of SEQ ID NOS: 40-222 and polynucleotide sequences represented by one of SEQ ID NOS: 285-484 and 548-561 exhibit increased expression in plants that have increased and extended expression of Zmm28, compared to a control maize plant. Therefore, these sequences and their allelic variants representing about 95% sequence identity to one of SEQ ID NOS: 40-222, 285-484 and 548-561 are suitable for expression modulation and/or activity modulation to improve agronomic characteristics of maize. This can be achieved by a variety of means, transgenic up-regulation, marker-assisted breeding that selects for increased expression alleles, genome editing or genome engineering that employ site-specific DNA modification, screening for naturally occurring variants or induced mutagenized populations or a combination thereof

[0137] Polynucleotide sequences encoding a polypeptide represented by one of SEQ ID NOS: 223-284 and polynucleotide sequences represented by one of SEQ ID NOS: 485-547 exhibit reduced expression in plants that have increased and extended expression of Zmm28. Therefore, these sequences and their allelic variants representing about 95% sequence identity to one of SEQ ID NOS: 223-284 and 485-547 are suitable for expression modulation and/or activity modulation to improve agronomic characteristics of maize. This can be achieved by a variety of means, transgenic down-regulation, marker-assisted breeding that selects for reduced expression alleles, genome editing or genome engineering that employ site-specific DNA modification, screening for naturally occurring variants or induced mutagenized populations or a combination thereof.

TABLE 4
List of differentially expressed genes at a 95% confidence
interval in DP202216 vs control V6 leaf tissue

| | Base | log₂ fold | adjusted |
|---|---|---|---|
| ID | mean | change | p-value |
| Zm00001d022088 | 366.7 | 2.161 | 0.000 |
| Zm00001d023455 | 399.2 | 1.309 | 0.000 |
| Zm00001d023456 | 775.4 | 1.175 | 0.000 |
| Zm00001d038273 | 268.1 | 1.056 | 0.000 |
| Zm00001d004053 | 788.2 | 1.054 | 0.000 |
| Zm00001d029183 | 467.1 | 0.885 | 0.018 |
| Zm00001d051194 | 422.1 | 0.735 | 0.006 |
| Zm00001d033132 | 1007.7 | 0.719 | 0.000 |
| Zm00001d029215 | 401.8 | 0.710 | 0.049 |
| Zm00001d033543 | 949.1 | 0.710 | 0.010 |
| Zm00001d053925 | 887.4 | 0.695 | 0.003 |
| Zm00001d028269 | 226.6 | 0.651 | 0.000 |
| Zm00001d033544 | 255.6 | 0.643 | 0.000 |
| Zm00001d034015 | 844.9 | 0.617 | 0.000 |
| Zm00001d027743 | 384.8 | 0.601 | 0.000 |
| Zm00001d048311 | 698.4 | 0.565 | 0.000 |
| Zm00001d053787 | 4263.0 | 0.508 | 0.019 |
| Zm00001d047256 | 331.2 | 0.490 | 0.000 |
| Zm00001d048720 | 258.8 | 0.440 | 0.017 |
| Zm00001d023426 | 2247.4 | 0.436 | 0.004 |
| Zm00001d004331 | 771.7 | 0.430 | 0.049 |
| Zm00001d050748 | 566.4 | 0.424 | 0.000 |
| Zm00001d010321 | 1082.7 | 0.416 | 0.008 |
| Zm00001d004894 | 15128.1 | 0.403 | 0.000 |
| Zm00001d042346 | 506.7 | 0.401 | 0.045 |
| Zm00001d031657 | 1064.8 | 0.393 | 0.002 |
| Zm00001d008178 | 262.0 | 0.377 | 0.042 |
| Zm00001d043044 | 3741.8 | 0.371 | 0.001 |
| Zm00001d018623 | 374.5 | 0.370 | 0.002 |
| Zm00001d043095 | 820.2 | 0.369 | 0.000 |
| Zm00001d029062 | 448.4 | 0.354 | 0.018 |
| Zm00001d011900 | 1851.3 | 0.347 | 0.001 |
| Zm00001d010672 | 3578.8 | 0.333 | 0.003 |
| Zm00001d011183 | 6346.0 | 0.324 | 0.049 |
| Zm00001d037103 | 1178.1 | 0.322 | 0.039 |
| Zm00001d009028 | 28412.8 | 0.318 | 0.038 |
| Zm00001d013937 | 3658.0 | 0.318 | 0.008 |
| Zm00001d002873 | 412.1 | 0.315 | 0.010 |
| Zm00001d037362 | 731.7 | 0.311 | 0.039 |
| Zm00001d026404 | 8690.7 | 0.310 | 0.028 |
| Zm00001d047255 | 2253.8 | 0.309 | 0.024 |
| Zm00001d031253 | 5805.9 | 0.309 | 0.000 |
| Zm00001d027576 | 856.8 | 0.306 | 0.011 |
| Zm00001d052595 | 12058.5 | 0.304 | 0.002 |
| Zm00001d013367 | 1046.5 | 0.301 | 0.007 |
| Zm00001d046001 | 2845.8 | 0.297 | 0.049 |
| Zm00001d008963 | 418.8 | 0.296 | 0.049 |
| Zm00001d048515 | 366.0 | 0.290 | 0.043 |
| Zm00001d018779 | 5833.9 | 0.289 | 0.028 |
| Zm00001d052595 | 5155.7 | 0.289 | 0.020 |
| Zm00001d042049 | 5095.7 | 0.288 | 0.016 |
| Zm00001d040242 | 573.1 | 0.287 | 0.022 |
| Zm00001d042697 | 29924.1 | 0.285 | 0.000 |
| Zm00001d019518 | 2389.6 | 0.283 | 0.004 |
| Zm00001d048313 | 568.8 | 0.283 | 0.034 |
| Zm00001d033150 | 2844.8 | 0.281 | 0.000 |
| Zm00001d007858 | 4471.7 | 0.280 | 0.000 |
| Zm00001d003588 | 1202.7 | 0.280 | 0.005 |
| Zm00001d036903 | 1562.2 | 0.279 | 0.019 |
| Zm00001d031484 | 3091.2 | 0.276 | 0.000 |
| Zm00001d018157 | 2066.8 | 0.275 | 0.012 |
| Zm00001d005814 | 3964.9 | 0.275 | 0.000 |
| Zm00001d033338 | 1889.2 | 0.275 | 0.028 |
| Zm00001d053446 | 1126.3 | 0.272 | 0.027 |
| Zm00001d026603 | 26238.1 | 0.271 | 0.000 |
| Zm00001d027841 | 19250.6 | 0.270 | 0.016 |
| Zm00001d030048 | 4061.0 | 0.269 | 0.001 |
| Zm00001d005346 | 4426.3 | 0.267 | 0.025 |
| Zm00001d023706 | 4737.6 | 0.267 | 0.000 |
| Zm00001d042050 | 13900.2 | 0.266 | 0.013 |
| Zm00001d042533 | 870.8 | 0.262 | 0.019 |
| Zm00001d022590 | 756.8 | 0.261 | 0.024 |
| Zm00001d045431 | 3088.4 | 0.260 | 0.045 |
| Zm00001d047743 | 2167.9 | 0.260 | 0.000 |
| Zm00001d036738 | 4088.9 | 0.251 | 0.000 |
| Zm00001d018274 | 2320.0 | 0.251 | 0.020 |
| Zm00001d035003 | 9178.4 | 0.251 | 0.028 |
| Zm00001d027321 | 906.8 | 0.250 | 0.013 |
| Zm00001d014284 | 2863.7 | 0.249 | 0.000 |
| Zm00001d036340 | 3635.8 | 0.248 | 0.039 |
| Zm00001d003767 | 684.3 | 0.248 | 0.021 |
| Zm00001d031997 | 2770.7 | 0.246 | 0.022 |
| Zm00001d019479 | 7547.5 | 0.245 | 0.000 |
| Zm00001d024148 | 10915.4 | 0.244 | 0.013 |
| Zm00001d038579 | 22011.0 | 0.243 | 0.000 |
| Zm00001d037273 | 2559.2 | 0.240 | 0.028 |
| Zm00001d025845 | 682.1 | 0.239 | 0.033 |
| Zm00001d027422 | 1300.4 | 0.239 | 0.049 |
| Zm00001d024519 | 15382.2 | 0.238 | 0.000 |
| Zm00001d040163 | 4199.3 | 0.238 | 0.000 |
| Zm00001d012868 | 2451.1 | 0.237 | 0.001 |
| Zm00001d021763 | 46089.8 | 0.235 | 0.049 |
| Zm00001d035761 | 2876.1 | 0.232 | 0.028 |
| Zm00001d032301 | 1829.9 | 0.231 | 0.003 |
| Zm00001d028562 | 7597.8 | 0.231 | 0.048 |
| Zm00001d034538 | 1219.9 | 0.231 | 0.042 |
| Zm00001d048116 | 1310.7 | 0.230 | 0.003 |
| Zm00001d048998 | 33243.0 | 0.226 | 0.003 |
| Zm00001d049490 | 896.9 | 0.225 | 0.049 |
| Zm00001d015975 | 1389.6 | 0.224 | 0.030 |
| Zm00001d021435 | 101585.8 | 0.223 | 0.001 |
| Zm00001d015613 | 1517.4 | 0.221 | 0.049 |
| Zm00001d039258 | 45911.3 | 0.221 | 0.023 |
| Zm00001d007267 | 22445.6 | 0.220 | 0.000 |
| Zm00001d033383 | 8820.9 | 0.220 | 0.040 |
| Zm00001d026645 | 774.2 | 0.220 | 0.028 |
| Zm00001d023757 | 3788.0 | 0.219 | 0.026 |
| Zm00001d034005 | 1328.0 | 0.218 | 0.017 |
| Zm00001d022381 | 1437.7 | 0.215 | 0.028 |
| Zm00001d031962 | 1481.3 | 0.214 | 0.012 |
| Zm00001d005446 | 17349.9 | 0.214 | 0.017 |
| Zm00001d027511 | 1065.8 | 0.211 | 0.034 |
| Zm00001d017178 | 1469.3 | 0.210 | 0.020 |
| Zm00001d038947 | 2902.2 | 0.209 | 0.007 |
| Zm00001d009982 | 2640.8 | 0.209 | 0.006 |
| Zm00001d034739 | 1282.4 | 0.208 | 0.033 |
| Zm00001d044745 | 2078.9 | 0.208 | 0.002 |
| Zm00001d038491 | 1871.3 | 0.208 | 0.007 |
| Zm00001d014445 | 2012.3 | 0.207 | 0.029 |
| Zm00001d039745 | 2541.4 | 0.207 | 0.049 |
| Zm00001d038485 | 2954.2 | 0.207 | 0.020 |
| Zm00001d012287 | 3196.9 | 0.205 | 0.042 |
| Zm00001d027694 | 4079.0 | 0.204 | 0.002 |
| Zm00001d003470 | 2149.7 | 0.204 | 0.049 |
| Zm00001d019180 | 1691.1 | 0.203 | 0.001 |
| Zm00001d007394 | 2809.7 | 0.203 | 0.046 |
| Zm00001d053432 | 14717.4 | 0.202 | 0.000 |
| Zm00001d039900 | 3507.8 | 0.200 | 0.004 |
| Zm00001d050810 | 2267.9 | 0.200 | 0.013 |
| Zm00001d016802 | 3694.7 | 0.200 | 0.024 |
| Zm00001d004978 | 1355.2 | 0.199 | 0.049 |
| Zm00001d028924 | 2314.7 | 0.199 | 0.017 |
| Zm00001d002815 | 6335.2 | 0.198 | 0.034 |
| Zm00001d029065 | 1335.9 | 0.198 | 0.033 |
| Zm00001d052184 | 1429.5 | 0.197 | 0.005 |
| Zm00001d038337 | 1709.0 | 0.193 | 0.049 |
| Zm00001d003713 | 843.8 | 0.193 | 0.049 |
| Zm00001d031953 | 2062.3 | 0.193 | 0.049 |
| Zm00001d053576 | 1070.5 | 0.191 | 0.036 |
| Zm00001d000123 | 4446.2 | 0.191 | 0.010 |
| Zm00001d045431 | 12598.3 | 0.190 | 0.039 |
| Zm00001d036630 | 26955.9 | 0.187 | 0.000 |
| Zm00001d048515 | 4138.4 | 0.186 | 0.044 |
| Zm00001d021310 | 10622.2 | 0.185 | 0.009 |
| Zm00001d038037 | 13570.3 | 0.184 | 0.005 |
| Zm00001d042353 | 1578.4 | 0.183 | 0.029 |
| Zm00001d050150 | 1799.2 | 0.183 | 0.014 |
| Zm00001d025545 | 10158.4 | 0.182 | 0.000 |
| Zm00001d012168 | 1918.6 | 0.182 | 0.006 |
| Zm00001d011581 | 2421.3 | 0.176 | 0.013 |
| Zm00001d018030 | 12550.6 | 0.173 | 0.012 |
| Zm00001d018145 | 15856.7 | 0.171 | 0.012 |
| Zm00001d040221 | 4822.7 | 0.170 | 0.001 |
| Zm00001d033594 | 4970.0 | 0.170 | 0.006 |
| Zm00001d008625 | 3404.2 | 0.170 | 0.015 |
| Zm00001d032380 | 6439.8 | 0.169 | 0.042 |
| Zm00001d045575 | 9388.9 | 0.165 | 0.012 |
| Zm00001d042526 | 12885.2 | 0.164 | 0.024 |
| Zm00001d043168 | 9130.5 | 0.164 | 0.014 |
| Zm00001d053545 | 13321.4 | 0.162 | 0.012 |
| Zm00001d053981 | 2247.8 | 0.162 | 0.031 |
| Zm00001d017746 | 3272.3 | 0.162 | 0.023 |
| Zm00001d012083 | 3531.8 | 0.161 | 0.002 |
| Zm00001d024718 | 1276.1 | 0.160 | 0.039 |
| Zm00001d021621 | 29252.0 | 0.160 | 0.033 |
| Zm00001d015004 | 3642.0 | 0.159 | 0.031 |
| Zm00001d039131 | 6755.2 | 0.158 | 0.013 |
| Zm00001d044970 | 11313.1 | 0.158 | 0.015 |
| Zm00001d018401 | 3854.9 | 0.156 | 0.007 |
| Zm00001d015975 | 2687.4 | 0.150 | 0.024 |
| Zm00001d013428 | 6916.2 | 0.150 | 0.002 |
| Zm00001d021246 | 8907.5 | 0.148 | 0.041 |
| Zm00001d007921 | 1700.3 | 0.146 | 0.045 |
| Zm00001d027511 | 11194.0 | 0.144 | 0.039 |
| Zm00001d027309 | 2776.5 | 0.140 | 0.031 |
| Zm00001d025544 | 4067.6 | 0.138 | 0.040 |
| Zm00001d039276 | 2421.5 | 0.137 | 0.049 |
| Zm00001d003512 | 7940.7 | 0.134 | 0.016 |
| Zm00001d053861 | 4328.4 | 0.130 | 0.048 |
| Zm00001d038894 | 18625.0 | 0.129 | 0.007 |
| Zm00001d051321 | 5842.9 | 0.128 | 0.039 |
| Zm00001d016826 | 6846.9 | 0.126 | 0.031 |
| Zm00001d016854 | 3875.9 | 0.122 | 0.032 |
| Zm00001d017435 | 4798.8 | 0.121 | 0.018 |
| Zm00001d048373 | 16010.1 | 0.109 | 0.019 |
| Zm00001d018901 | 18599.9 | 0.104 | 0.043 |
| Zm00001d019454 | 18340.3 | 0.100 | 0.046 |
| Zm00001d031899 | 38207.2 | 0.097 | 0.036 |
| Zm00001d045706 | 13660.8 | −0.114 | 0.003 |
| Zm00001d035869 | 3703.4 | −0.169 | 0.035 |
| Zm00001d053262 | 2715.0 | −0.177 | 0.034 |
| Zm00001d017958 | 1986.1 | −0.179 | 0.042 |
| Zm00001d007113 | 2081.6 | −0.182 | 0.007 |
| Zm00001d051650 | 1133.1 | −0.205 | 0.025 |
| Zm00001d015138 | 60518.8 | −0.222 | 0.000 |
| Zm00001d030103 | 1549.1 | −0.225 | 0.034 |
| Zm00001d021846 | 1819.7 | −0.226 | 0.000 |
| Zm00001d041576 | 849.3 | −0.252 | 0.039 |
| Zm00001d005391 | 618.2 | −0.255 | 0.019 |
| Zm00001d009022 | 4240.0 | −0.264 | 0.023 |
| Zm00001d041343 | 1309.4 | −0.268 | 0.045 |
| Zm00001d039965 | 528.6 | −0.274 | 0.025 |
| Zm00001d029047 | 509.7 | −0.275 | 0.021 |
| Zm00001d028230 | 2507.9 | −0.284 | 0.012 |
| Zm00001d013243 | 725.6 | −0.286 | 0.040 |
| Zm00001d032926 | 458.9 | −0.299 | 0.034 |
| Zm00001d045667 | 1861.6 | −0.302 | 0.000 |
| Zm00001d021846 | 701.7 | −0.303 | 0.025 |
| Zm00001d033469 | 934.7 | −0.312 | 0.032 |
| Zm00001d019563 | 3360.0 | −0.314 | 0.007 |
| Zm00001d003866 | 945.1 | −0.316 | 0.008 |
| Zm00001d039325 | 1802.7 | −0.321 | 0.000 |
| Zm00001d023516 | 69804.9 | −0.324 | 0.036 |
| Zm00001d050918 | 301.0 | −0.325 | 0.029 |
| Zm00001d025253 | 331.5 | −0.346 | 0.040 |
| Zm00001d024499 | 1459.3 | −0.364 | 0.029 |
| Zm00001d045948 | 478.6 | −0.374 | 0.013 |
| Zm00001d021569 | 473.1 | −0.376 | 0.024 |
| Zm00001d053327 | 601.3 | −0.377 | 0.002 |
| Zm00001d047208 | 736.1 | −0.379 | 0.000 |
| Zm00001d007687 | 1551.8 | −0.385 | 0.001 |
| Zm00001d015126 | 1333.7 | −0.395 | 0.005 |
| Zm00001d034781 | 288.2 | −0.403 | 0.006 |
| Zm00001d016655 | 1486.6 | −0.412 | 0.049 |
| Zm00001d043517 | 322.3 | −0.426 | 0.013 |
| Zm00001d045667 | 288.4 | −0.427 | 0.049 |

Base Mean = the mean of counts of all samples, normalized for sequencing depth.

### Example 5

### Transcriptome Analysis to Identify Differentially Expressed Genes

[0138] This example demonstrates identification of several differentially expressed genes in plants expressing Zmm28 transgenically. Transcriptome analysis was conducted to identify differentially-expressed genes (DEGs) and their associated pathways that could provide a possible molecular basis for the previously described increased photosynthesis, N uptake, and plant growth. For simplicity, RNA-seq analysis was focused on V6 leaves from DP202216 and control plants. Results of this analysis identified 192 up-regulated and 64 down-regulated transcripts in DP202216 leaves as compared to the control leaf data (Table 4). CArG box sequences were contained within 3 kb upstream of their promoters in 76% of the DEGs, relative to 26-28% of DEGs from two over-expressed non-MADS transcription factors over a total of four experiments.

### Example 6

### Increasing Photosynthetic Flux Through Gene Expression Alteration of One or More Sequences

[0139] In some embodiments, altering expression levels of direct target genes or their protein products/activities thereof (e.g., polypeptides represented by SEQ ID NOS: 23-31 or polynucleotides represented by SEQ ID NOS: 32-39)) may positively affect grain yield. In particular embodiments, altering expression or gene product amounts may change photosynthetic flux. For example, increasing expression of polypeptides represented by SEQ ID NOS: 23-31 may lead to increases in photosynthesis as measured by increased CO₂ exchange rate (CER) or electron transport rate. In other examples, expression changes may lead to positive feedback resulting in both increased leaf area with increased light interception and increased photosynthetic rate per leaf area. In yet other examples, expression changes in polypeptides represented by SEQ ID NOS: 23-31 may lead to increased photosynthate and enhanced uptake and assimilation of nitrogen. Increases or decreases in gene expression levels is achieved by introducing a targeted genetic modification or through expression of a recombinant DNA construct. Targeted genetic modifications include for example, removing a repressor element from the regulatory region of the gene or by mutating one or more motifs to increase expression levels of the gene. Enhancer elements can also be introduced to increase gene expression.

### Example 6

### Increasing Plant Growth and/or N-Assimilation Through Gene Expression Alteration

[0140] In some embodiments, altering gene expression of direct target genes may enhance plant growth. In particular embodiments, altering gene expression may lead to enhanced early vigor or enhanced grain yield. In some embodiments, changes in expression of SEQ ID NO: 30, 38, 563 and/or 564 lead to enhancement of phytohormone reception response leading to increased plant growth or enhanced grain yield.

[0141] In some embodiments, altering gene expression of direct target genes may enhance nitrogen uptake or assimilation. In particular embodiments, changes in expression of SEQ ID NO: 39 or related genes such as SEQ ID NO: 566 lead to improvements in nitrogen uptake or assimilation. Such improvements may further lead to enhanced plant growth and/or grain yield.

[0142] Increases or decreases in gene expression levels is achieved by introducing a targeted genetic modification or through expression of a recombinant DNA construct. Targeted genetic modifications include for example, removing a repressor element from the regulatory region of the gene or by mutating one or more motifs to increase expression levels of the gene. Enhancer elements can also be introduced to increase gene expression

### Example 7

### Increasing Plant Stress Tolerance

[0143] In some embodiments, altering gene expression of direct target genes may enhance plant stress or disease tolerance. In particular embodiments, changes in expression of SEQ ID NOS: 574-579 results in improvements in biotic or abiotic stress tolerance. In particular embodiments, such expression changes and stress tolerance may lead to enhanced plant vigor, enhanced biomass accumulation and/or enhanced grain yield.

[0144] Increases or decreases in gene expression levels to improve plant stress tolerance is achieved by introducing a targeted genetic modification or through expression of a recombinant DNA construct. Targeted genetic modifications include for example, removing a repressor element from the regulatory region of the gene or by mutating one or more motifs to increase expression levels of the gene. Enhancer elements can also be introduced to increase gene expression

[0145] Terms used in the claims and specification are defined as set forth below unless otherwise specified. It must be noted that, as used in the specification and the appended claims, the singular forms “a,” “an” and “the” include plural referents unless the context clearly dictates otherwise.

[0146] All publications and patent applications in this specification are indicative of the level of ordinary skill in the art to which this invention pertains. All publications and patent applications are herein incorporated by reference to the same extent as if each individual publication or patent application was specifically and individually indicated by reference.

[0147] Unless defined otherwise, all technical and scientific terms used herein have the same meaning as commonly understood by one of ordinary skill in the art to which this invention belongs. Unless mentioned otherwise, the techniques employed or contemplated herein are standard methodologies well known to one of ordinary skill in the art. The materials, methods and examples are illustrative only and not limiting.

[0148] Many modifications and other embodiments of the inventions set forth herein will come to mind to one skilled in the art to which these inventions pertain having the benefit of the teachings presented in the foregoing descriptions and the associated drawings. Therefore, it is to be understood that the inventions are not to be limited to the specific embodiments disclosed and that modifications and other embodiments are intended to be included within the scope of the appended claims. Although specific terms are employed herein, they are used in a generic and descriptive sense only and not for purposes of limitation.

[0149] Units, prefixes and symbols may be denoted in their SI accepted form. Unless otherwise indicated, nucleic acids are written left to right in 5′ to 3′ orientation; amino acid sequences are written left to right in amino to carboxy orientation, respectively. Numeric ranges are inclusive of the numbers defining the range. Amino acids may be referred to herein by either their commonly known three letter symbols or by the one-letter symbols recommended by the IUPAC-IUB Biochemical Nomenclature Commission. Nucleotides, likewise, may be referred to by their commonly accepted single-letter codes.

The application's sequence listing, which the Patent Office published only in electronic form, follows.

SEQUENCE LISTING (580 sequences)

SEQ ID NO: 1 - protein, 269 aa, Zea mays
MGRGRIEIKRIENNTSRQVTFCKRRNGLLKKAYELSVLCDAEVALIVFSSRGRLYEYANNSVKATIERYKKAHTVGSSSGPPLLEHNAQQFYQQESAKLRNQIQMLQNTNRHLVGDSVGNLSLKELKQLESRLEKGISKIRARKSELLAAEISYMAKRETELQNDHMTLRTKIEEGEQQLQQVTVARSVAAAAAAATNLELNPFLEMDTKCFFTGGPFATLDMKCFLPGSLQQMLEAQQRQMLATELNLGYQLAPPGSDAADNNPHHQF

SEQ ID NO: 2 - protein, 255 aa, Zea mays
MGRGRVELKRIENKINRQVTFSKRRNGLLKKAYELSVLCDAEVALIIFSSRGKLYEFGSAGITKTLERYQHCCYNAQDSNGALSETQSWYQEMSKLRAKFEALQRTQRHLLGEELGPLSVKELQQLEKQLECALSQARQRKTQLMMEQVEELRRKERHLGEMNRQLKHKLEAEGCSNYRTLQHAAWPAPGSTMVEHDGATYHVHPTTAQSVAMDCEPTLQIGYPPHHQFLPSEAANNIPRSPPGGENNFMLGWVL

SEQ ID NO: 3 - protein, 271 aa, Zea mays
MGRGKVQLKRIENKINRQVTFSKRRNGLLKKAHEISVLCDAEVAVIVFSPKGKLYEYASDSRMDKILERYERYSYAEKALISAESESEGNWCHEYRKLKAKIETIQRCHKHLMGEDLESLNPKELQQLEQQLESSLKHIRSRKSHLMAESISELQKKERSLQEENKALQKELSERQKAVASRQQQQQQVQWDQQTQVQVQTSSSSSSFMMRQDQQGLPPPQNICFPPLSIGERGEEVAAAAQQQLPPPPGQAQPQLRIAGLPPWMLSHLNA

SEQ ID NO: 4 - protein, 248 aa, Zea mays
MGRGKVELKRIENKISRQVTFAKRRNGLLKKAYELSLLCDAEVALIIFSGRGRLFEFSSSSWYDARALRMYKTLERYRSSNYSQEVKTPLDTEIKYQDYLKLRTRVEFLQTTQRNILGEDLGPLSMKELEQLEDQIEISLKHISSRKNQMLLDQLFDLKSKEQELLDLNKDLRKQLQETRPENALRVSWEEGGHSGASGNVLDPYQGLLQHLDNDPSLQFGYHHQAYMDQLNNEDLVDPNEHGRSGWI

SEQ ID NO: 5 - protein, 240 aa, Zea mays
MGRGRVELKRIENKINRQVTFAKRRNGLLKKAYELSVLCDAEVALIIFSNRGKLYEFSSTQSMPKTLEKYQKCSFAGPETALQNRENEQLKSSRNEYLKLKARVDNLQRTQRNLLGEDLESLGIKELEHLEKQLDSSLKHIRSTRTQHMVDQLTELQKKEQMFCEANKCLRRRLEESNQVIWQHAWEQSERHSEVQPQQLNGNNFFHPLDGAGEPTLQIGYPSEALTSSCMTTFLPPWLP

SEQ ID NO: 6 - protein, 244 aa, Zea mays
MGRGRVELKRIENKINRQVTFAKRRNGLLKKAYELSVLCDAEVALIVFSNRGKLYEFCSGPSITRTLERYEKNSYAGPDTAVQNKENELVQNSRNEYLKLKAKVDNLQRTQRNLLGEDLGSLGVKELDQLEKQIDSSLSHIRSTRTQHMLDQLTDLQRREQMMCEANKCLRRKLEETSNQVHGQVWEHGANLLLGYERHSSPQQAPSHVGNGLFFHPLEAAAEPTLQIGFAPEHMNNFMPAWLP

SEQ ID NO: 7 - protein, 240 aa, Zea mays
MGRGKVVLQRIENKISRQVTFAKRRNGLLKKAYELSILCDAEVALVLFSHAGRLYQFSSSSNLLKTLERYQRYIYASADAAVPSSDQMQNNYQEYVKLKARVEVLQHSQRNLLGEDLALLSPSELDQLENQVDKTLKQIRSRKTQVLLDELCDLKRKEQMLQDANRVLKRKLGEFEAEAASPPQLAWQGEGGMLSHDPPQPEHFFQALESNPCLQPTYHTMDMNQQPVPAPGGCYPAWMS

SEQ ID NO: 8 - protein, 183 aa, Zea mays
MARERREIRRIESAAARQVTFSKRRRGLFKKAEELAVLCDADVALVVFSATGRLSQFASSSVNDIVDKYSTHSKNLGKSHQQPSIDLNVEQSKYSGLNEQLAEETNGLRQMRGEDLEGLSVEELHRMERKLEAGLHRVISTKDQLFMQQIGELLQKGTQLEDENRRLKEQKISSLKTGSRLNL

SEQ ID NO: 9 - protein, 233 aa, Zea mays
MVGTGKRERIAIRRIDNLAARQVTFSKRRRGLFKKAEELSILCDAEVGLVVFSATGKLFHFASSSMKQVIDRYDSHSKTLQRSEPQSSQLQSHMDDGTCARLKEELAETSLKLRQMRGEELQRLSVEQLQELEKTLESGLGSVLKTKSQKILDEISGLERKRTQLIEENSRLKEQVTRMSRMETQLGADPEFVYEEGQSSESVTNTSYPRPSTDTDDCSDTSLRLGLPLFSSK

SEQ ID NO: 10 - protein, 284 aa, Zea mays
MTRRNGCTIYVGNLPGDIREREVDDLFYKGRQCGLRMYGRIVEIDLKIPPRPPGFAFVEFEDARDAEDAIYGRDGYNFDGHRLRVELAHGGRGTSSFDRSSSYSSAGQRGASKRSDYRVMVTGLPSSASWQDLKDHMRRAGDVCFTDVYREAGATIGIADYTNYEDMKHAIRKLDDSEFRNAFSRTYVRVREYDARRSRSRSRGRNRSKSRSRSHSHSYSRSRSCSYSKSRSPRSRSASESKSPVKARSPSRSPPVSPRRDKSASRSPARSKSLPRSCSPAKSE

SEQ ID NO: 11 - protein, 152 aa, Zea mays
MGSVLLPTLRLKSEVDAAIRDTLDKVLVLRFGRATDATCLHLDDILDKSSWDISKFAMVALVDMDSEEIQVYIDYFDITLVPATIFFFNAHHMKMDSGTPDHTKWIGSFSSKQDFIDVVEAIFRGAMKGKLIVSCPLPPERIPRFQLLFKDV

SEQ ID NO: 12 - DNA, 5752 bp, Zea mays
gtcatcagtagtagtggccttttgcccttgcccctctctctcacctctcttttctcagccttgcttccgatggatcccatcccactgccatcctttctttcccttgcgcgcattgcctagccggccggccggcctgctattaaaccactttacccgccccctctcgctcacgctcgacgcagctcccttttccttgtttgcttattgcaagtctctgcaagaacctgctagagaggaacaaggtagagtagtatcgcttttttccatctaggttatctctttttacatgaaaaatttcagccgtatttcgttctccatcagtcctgcgataatatatacgcgcgtcttgtgtgatccggcatatgtatagttcctgctaactgatcgagatcgctctcgtttgtactttctccctttgaggaaagagtttccccttttctgtgcttcaagttcttgtaaggaaaaccatgcctgccagcttcttctgctacttgtatgatgattcttatttgcttattacttgatttccgttttttttcttgctttctatatgtatgtatctgggctgtcttcccctgcgtctcgttactgctaagctttggaaggtttcaactctttgtatacgatgaggtttctgctcctagtagcagatccgcgcatatgactagatgtttgaggaaaagaaaagggcaagacgctatatatatatgcagcacgcagtcgcacatatattcagttttccaatctgcctcttgctttatgataattcaacttgcgctgattatattcttggctacctagaaatgtctaattaaactttgtttgctagctagattttgttgcttcctttcgcatctgatctttttatctcttctgagtgctccgcaaagccttccagtgttgaagaagctgctggaagaacgaagagatgagctttctcttgaaggaaaaagagatgatcattgctggtttgttgttgtttcgtgtttttttagcttcttgtcccccatttatatttcgcgcctaatgaacgagctcgtagatcttgtgttcttgtggctggttttgttggatctcgatctcggttacgtttacatgagtctactcttgcctaacatacatctgtgttctttttctaggctgagagaaacttaactgatcgagtctgcctggcaggcatcgatctatccagtcgtcagttcgtcacatccgctttttcgtatatatcatcttcagattttaattgtccatctgtcaaatcatggaaaatctgtcgtctttgcttgtattctcttctgtcattcctgctgcctccggcggatcaattcttgaatcgacccgtgttcctattcccttttgttagacagcccaaatcgcttgctcgatcgtagtgtactgtactactgcggctagctagatcttccaagctagctagttcgtcggtccctttgatctgctccacttgaactcttttgcgcttatgagaaaacttgctgctttcagctggtatcgccagcatgggtaggggaaggattgagatcaagaggatcgagaacaacacgagccggcaggtcaccttctgcaagcgccgcaatgggctcctcaagaaggcgtatgagctctccgtcctctgcgacgctgaggtggccctcatcgtcttctctagccgtggtcgcctctacgagtatgccaacaacaggtgagtgagccgtgtgaggtgcttagatcttggacaccctggtgaacgcttgatcatttttcagcatgtcatcatttcatgctcaagtcatcgacttgctgattgcgctgttgcgttgcgtcatgggcactcagcagaaaatggaatcttattcatttgtagtgcggcggcgcttgcgggatttagttcccgtttagaagtacccaatttttaagaaacagatttatagaaatttaggtagtaccaaacataccaatttatggcttagtttataaaaattggattactagtttcttagaaaccaagaagttgacctttcctaacttaaagataaaaactggtttttcaaacaacatcttagttcctctctcatcggtagttcatgaataaattgattagtaaggatttctaaaagatacaaaaaatcgtcaaaattgtcatatgttcagtggtcagaccatatatatatatatatatgtttaggagttatttcttcaaaattatgtgatggacaggaaagggcacagcgttcatcatgtataataatactgacagagacgaccattttattgccatgcaaatttacacaaaaaactaccacatgcttattggattttcctcatctgtgttagctaatataatgatttatcttgttaacccactacatgttatcgagttattaatcatatattgcattgtcatgtgatatatcttgtttgtgcatataataccgagacaaggattgactgactctatgtacacatgaattggaacgtaaccgtgcaaactgcaaactagtgcttctttcatgcattgtttgctattcaaatactactgttattagattttgattttagatctgagtgttcattcggatctatgtttttagacagatttagggtacatttggttggagagtcaactagaatagagtgactccattccagttatttagaataaagtcattcaattctgcgtttggcaagccgaacagagtcattctatttttttgtttgatcgaagatagagtggagttgctctgttctttatttggatggagagtcatatgaatgtagagaagagggagagggaggagagtgctcgtatccagtcattttggtggagctggagtattccaattatttacggtaaatttttatatgaagactttaggagccgctccacttcttttttgttgaaaaccaagtatccagaaaacaagaatagatcaactcctcaaccaaacacacctttactctctccctcggtttgttttggtgtgatttttaataataagttggtctcatcctcttcctagaagagataaaaccggatgtttaattttcatggcataaaaaaaatgttatttagattttcagagctaaaacatccgtgctctagtttccacacactaggttcaacaaaatcgataagaacaagaatgcatttgcgtagtggtagatgaaagtttgtcgcactgacgtcttctgccctgtcaaatgcctttacatgctcctcggtctctctctctcacacacacagaacacaaaaaaacaaggtcttcttgttgcactgtgtccgagaggacgttgcaacgtacgtactgacctgactctaaactagctgtcaagagttaccctttgctcgcatcccgctagtaccagaacgtacacctcagtcacctcgtcggcaaacttgcaccggctcacccccccatattcgcggtgcttgctctcccctctccgatgcaaagcgtcaatcaacaacaaatgcacgccgcagtgctccattcctctcctgtgcttcattctgccgagcaaaagtttttcaacagcagcagaggggaacgatgacaacacacacacagctgcattttattctttcaaaagtttcgcaatgggaagcttgttcacatgcatgcatgcatgcattgactgggccgggtgtagggaaaattttcacctcacaatttaatagctttcgcctgtttcgtgttgctgtggcctcgagaacacagaaggagctataggctgcattgtcacttcagtattactgacaacacaccatgcatgcatatgcatcctccatgccttttgctttgttccactaattgattggtctagctgctgcagtgtcaaggctactattgagaggtacaagaaggcacacaccgttggctcttcctctgggccaccgctcctagagcacaatgcccaggtaatttatacctttgctgttcttacagtaaagtacggtggtcattttatgatttacaatttctttccatacacgtagccatccatatgcatgcattgagagattcttctggaagtaacttaatttgacattagtactagggctgtagcgcatatgctaaatatatacacatactgaatctatatttcttgatgatcatgctgatcgagaaccaatagcgattgaatgacccggaaatttctaaaactgaaatagtcatacacctgaacaaagtagttgtcagaccccctcaatattccatttacttaatttggacttggataatgtccaaaattatgagatccatgcatccatctgatcctttcctccaactctttgttttatatgctgaagcaattctaccagcaagaatcagcaaaactgcgcaaccagatccagatgctgcaaaacactaacaggtacgtagagaagccttgtgcagaatttactctctctaaagctagagaaccattggtaacaactgactgacagtacacacgtactgacgtactgcctgtattctctgattatttttctcccttgtgaaggcacttggttggtgattccgtgggaaacctgtcactcaaggagctgaagcagctggagagccgccttgagaaaggcatctctaagatcagggccaggaaggtaagaaatgtatagcattatccaaaccatcttcaagcaaactaatcatataaactaattaagtgatactcaattctttatatactgtgtatatttggccacatcaattaattgcttcccaagactccttttgtttcaataatcttcaagttctgatgtaattctgagttgggctttggataggttgttgccagacattgacttctgaattcttgtttcagagtgagctgctggctgcggagatcagttacatggccaaaagggtaatgcacacataaacctcattttagctaaccctattggattcattcgtttgcatcatatcatgcatgtccgcaggagactgagcttcagaatgaccacatgaccctcaggaccaaggtatatatgcttgcttgcagcaattgtagaactagctagaacccaatcttttctttttcttgcatatatagccacctagaccggaaagtaaagaaaaaactacatgattagtaatcttgagaattatttatgcatctgtggtagctgaacattttgtcaattgtcttgtcagattgaggagggagagcaacagctgcagcaggtgaccgtggcacggtcagttgcagcagcagcagcagctgccaccaacttggagctgaacccattcttagagatggataccaaatgcttcttcactggcggccccttcgcaacgctggacatgaagtgctttctccccggcagcttgcagcagatgctggaggcacagcagcgccagatgctcgccaccgagctgaacctcggctaccaactggcgccgcctggttctgacgctgccgacaataaccctcatcatcagttctaaactggatgcatgcacgagaagcttttcaagcgaactgtgaacgatggaagctggctgttgcctctagatgttcttggcttccatgacctagcttattatggtgtgtattgttgttgccttttgtgtgtgattctccttgctactctactgatggagaactaaacctaatcgattggacataatgatcaaatgctacagatcctgtgatgctgtgatcaggttaaggcaaaacatgtatactgattgcttaaatgggtttacgagtgacgacaatgctatttgttgcttctattactgctcaa

SEQ ID NO: 13 - DNA, 7594 bp, Zea mays
cacacacacacagtgaccctgccccttttcccggccgtctcgctctccaccgatattccgctcctcctgtccagtcctcctcccccgagccggctcattatatcgtccgtcgcgcagcacaacgcaagtttgctagcggccggatcagcagccacaaaacgaggagagcaaccacgctgcacacagagacgcccgtgtgtgagatatagagcaagctcgatcgaaggaaggagggaagctagagatcgtacgtcgccatggggaggggacgagttgagctcaagcggatcgagaacaagatcaaccgccaggtcaccttctccaagcgccgcaacggcctgctcaagaaggcctacgagctctccgtgctctgcgacgccgaggtcgcgctcatcatcttctccagccgcggcaagctctacgagttcggcagcgccgggtaggcgatctcgatcaccacacatatatgcatgcacagcacagcccccccaacccaacccactaactaacactaattaatttcaccctcctgcaagcagatctgcttgttgccgctgctgtgctgcgttttacttgcgcttttaccacaagagatctgcttcctttttattatctcctttttctccccctttctctgtgatttcatgtttttttagcagcggcgtttatttaaagccagtagtagccaagctactagctgcagctcctggccttggcctgaggggcatgttatttttattcctgcaatatacctgcgtgcgtgtgtgtatctgtgtgcgcgtaggtgcatggcggtgttcatataaaccggccgggtgtgggtggatccctaactggcacgagacatcctctcagcagatctacgagccctacgctttgcctctttcctccagcttctcgggtagtcgtcgcccgcccccacgcccgccctttcctccatcttctccgggtgtctggagtggccatctttcgtgtgttgggtgggccggggcatgcgcgtgtcagagacacgcacggtcgattgctgctgaggtagctaggggatcgatcgtacgttgtcgctggatggaggaaggtaaagagttaacactgatgtgatctgctgagaggggaaaggggtagtatgttctttccgttttgatccagcgcctgcttctatgaaaatcctgctgcatgcatgcccacgcacacctgttctgctcgatctggtggctaccttcatcttattatctcctgatctatatctcttgctctcgattgctccttaattggcagtgcaaatttcatgtcattttgcttggcagtgcaaatttcaattttattaggcttgctccaaataacatttagatctgcttgagattttcaggaggcctcaacattttaagctgaaagctgaaagcatgataatgaaaatctttctgtttcgcccctagtcgtcttttcacccatcctctcctttgtttcttattgtttttgtgttcttttcttctatattactggtgtttgatgtctaaagagatgtattactctttgtttgttcttaaggtatacgtgggagactatttccggctttgctattttctttgttctcattttatgcgtatgcctcagtgctactcagccatgagtggtcgctcttttgcctttactgatagtatagtatgttgcttgcacgcacttcttgctttgtctttcgcgctgctgtttaaagatcgttttaccttagctatttcttcatatatatgactggatctggactaatataattaaacgtaagtttgtatttcttcacaaaattttcatagaacgcaaacacgcatgaccaattctattttcccccttttttcaagcgctagtctgttcaattcgtttgtagcttgaattattaaaataatacctttcgttgaaaataataatatatataaggtccaaacttcaaatttgctccggggatgtatatgtggttcagagtttcagacttggaacctctccatagcatgttttaagttgaagtttgtttgattcacaaactgttgagatgatgtattatttgagctgtatggctgtatgcatgaacatgcaaaaggccggaacgatatttccatttccaaaaaaaaaagacttggaacctctccattaaacactgcgtcttacaaatttgctgtgatatatggtggacatcttatattatgtgcctttaatttgtgtgacgatatgtatggatctattttatgattttaagtatatgagcattgttttgtagtaggagagtgatcttattccctcgagtttcaactgttatggtttaattctggaaaaaatgttttagtttaacaagaagaaagtgctaaaatgttcaccaccaattcactaggccgggcctgtgagtttgttgggaggcgacttttgttgctttgagctttgtttttttcttttgtcagtgtatttctcttccgtgtatccaataaaactttggccacttcaatcctcttcctgtgctttcgaaaaaatactagggttctattgcgtcagagaactagtctgatttcgtcaaggtatatatattgagccagactttattttgcagaaccgtttgttcatggtggtcgatgttcatacaataaacataaggcaaacggggatctgaaaatttctatcttcatgtaccatacattgatgcttcataaatttatatttttatatattagtttcaagacaaaaaccttgatttaaatgacatctgtgggaaacaaggctcagaaataaagagctacatctacgtcaaaggaactaaagagccatatagctacaacacagagtattcagtagttcttgtaattcttatatataggcatatatattaatcataagtgcatagctacaagatattcacgaatttttacagattatcttcaactttagttgttctaaagatggaagctcccaaataatgttctacaaactgcttctcatgtgacgagagcacaaccactaccggaatttggctctttgccgagtgccatattctttgccgagtgttttatctcgggcactcggcaaagagctctttgtcgagtgccacacaaaaaaccctcggtaaaagaaaacactcggcgaagaagctctttgccgagtgttttatttttgacactcggcaaagagtttctttgtcgagtgtcttttttagacactcggcaaagaacgtgattccggtagtgaacctcctgcgggcttgttcggtaagctaggaatttagccaaaaactgtttcaactcatcgaaggttcaaggctatataaactagctaggcaagcattcctgataggaattgttccagatcatggttcgtgcggaaccgacattcctaacaggaattgtttctagggcatggttcgtgaggaactcgatgacaatgcctaaggccttattccatatagattgaaggggatgtgagtgtattgagatggattttgacttactaactatggatttaaaccgactaaatctcgcccaatccacatggattagcatcaaccgaacaagccctaatgtggttcatttgtaatccacatgaaatcagacttctttgatacaagaaagaatacaataatgttagtaaatagctatatacatatatatacaaacagggcagcccttgcatacaccaatacattcctcatcagcatctttgccattttagattatagacgtcattttcagaaattttgtagtttcatcaagtaagtccttttacatgtaaatttttgtgcagcataacaaaaactttagaaaggtaccaacattgctgctacaatgctcaagattccaatggcgcactctctgaaactcaggtatgtcatcaatcatagcttaggataaactctttattaaaattattctcctaaaaaaataaacatgttccctctttatgtttttatgaaaacttttatttagtccctataatatacaaccataaactagagatataatcaaataaaagagaagagttttaccgattaccgatcttactatgatggtgatattacatggtcggagcttttctggcagctgcagctagctataggattttgtttcgatgtagtagcagccgcagcccaaacggttggattaaagtgtttctatatctgacattgcattgaccgcctccatccccttctatatctgacatcttatgcactatttctataatttattgaattttagtcagcattgcattgcccgcctcagctccatccccttctatatctgacattgtaaaatggctattactgctgtctttcaatgttagctgcgtatactgcgtaattaggtcgatcccaaagtaggctcaggacaattaactatagaatgaagtaaagtttctgcaaccttttttttgtactagacatttctaaaaggtcatcccttattgtgttctagaatgcattaaaacctgctgataagagctcacaatataattgctatgcaattgaactaatgaggctgtgtatgatggttatgtagagctggtaccaggaaatgtcaaaactgagggcaaaattcgaggccttgcagcgcactcagaggttggtttgtcatactttcacatgtgataatatagtataatgtctctaaaatgggatttatctaaagtatttaatgcaaatacatattttctagaaatttatttgaatgctgtacacattaaatgaccacaaaattaacataattcatttatgtggtaaaacttggaaaagcaggcacttgcttggggaggaacttggcccactgagtgtgaaggagttgcagcagctagagaaacagctcgaatgtgctttgtcacaggcaagacagagaaaggtttcgtatcacagtcttcccttatgttatgaaatatataccttctgttttaaagctaacatgtaacaccttatctactcccgacagtctggcagccctttaggataatagatcattcccacatcaacacgagtcttttgcatgcactttgtcttgacgagtgcgcatccaagaaaactcctaagtcgatcgatcactcatcccaatatttttctaaaccaagcacgcttaatctagaggttcttttgaagttggcttacgaaaaaaatatacccttattaatatgagtattctatcattttttaagcattggaccagaatatcaggtaacaacatataggattcagtgcaatctagaactcgtacaagctaaacggacatggtgttgtctgcaatggaacgcgcatgtagatatgccaactttgtgtaagatagcgatagtaaatgtatttcagtttcttatggaggtggataattcattaaacaaccatatgcttcttacaagtatttgaaagaaattgcagacaagtatgtgattaaacactttaggctataactgaccttattttatcagccttaaaatgtcagcacatgtatccgagcataggaaagatacaatatcttttgtaattaccgacgttagctttcataggaaagatacaatatatggtaacctatgtggctaatatatgcatgctagtcataataaagcaagcatccgagcatttttgttgccatgcctttgaaaattttacactaaaatatacctccatatttatttactctgctactcactccgttcttaaatatatgacgccgttgactttttaaaattttgactactcgtcttattcagaaaaatatgaattatcatttattttgttatggtttgttttatcacttaaggttgtttgagcatgacttgaaattttatatttttgaataaatattttgaataagacaagtggtcaaagttttaaaaaaatcaacgacatcatgtatttaagaacggagggattatatctttagtagtaaaaaaacaagaaagcaacatcattaacatgtaatgcatagaaagaggttgaagtatactagatgaaattattagtacaataactcggtagtcctaatgatgtagcatatatatgtgtcaaaacttcaattgccataaatttgatctgatatcttttaaatgttagagcaaataatagccttcatcccctcctgttccaatacaaacacataggactaatcgccaaccactaaagccccgtacaatatgagccaatatatcataagaatgcttccagaaaatatagcgtcacaatgtgaaaaatcagctttgttgatttaatcagttttcttataaatgaaaaatgtaaaaaaaacatacttctccattatttcttgagattaatataattgttccttaaaattgttggcagacacaacttatgatggagcaagtggaagagctccgcagaaaggtatttcatactacagacttcgtttacaatagtaatactctacagcttgcatggtatagccagctctcgggcataggctctatcttatgcatagtagggaaggatgatcctattgcatgcgtgttctttagctgaaaaactatatatatggttgtttagagaggtatgcgtaggtgtcttccttgtactcttttgtactacacgagattcagccgtcctcgtccaccgtaccctaatgtctaaaatattcgccacattctcatggactgcgcaggagcgacacctgggagaaatgaacaggcaactcaaacacaaggtccttatctcttccctataatggaatggaagctatatacattagagctgaataaatggcttatatgttatccgattctacagcttgaagctgaaggttgtagcaactacagaaccctgcagcatgcagcctggccagctcccggcagcaccatggtggagcatgacggcgccacctatcatgtgcatccaacaactgctcaatcggttgcaatggactgtgaacccactctgcaaatcgggtataataccctggtcgatcgtaattatatatattcaagaaacgcaaacacacacacatgctgctggtgctcactgatcactaataaacctgatcgtcattgcagcgtactaataattaaccaaacaaaactgactctgttttcaggtaccctcctcatcaccagtttctgccttccgaggcagccaataatatcccaaggagcccccctggaggcgagaacaacttcatgctgggatgggttctttgagttgctctgttaatcatccatccatcagatggatgtccaaactaataaaaggcactcagtgctaccatatgcatatccatgcttaagtgcttgatttgccacgacgtgggatatcttttaaatttatcgttctggtgtgtaataactaattaagaacggcaccttcattctatggttgtggtgtggcacttctatctatggtttttgtatttggaccacgaatgttgtaatttgtaaaaaaatttaaagatttatctatgctgccggtgctgcggtgcatagcccggtgcatagaatccaaaattatctgcaccggtgcttattatgtgctgatgcatagctgtgtaccattgttttgggtcatttttctgctctatattatttgtccctttctactggcccatgcctcttaaagcatagctacagactatcgccagttttt

SEQ ID NO: 14 - DNA, 11538 bp, Zea mays
tatgtgtattatactgctaaaaatatcttcttcttctcggccgtacaagtaggtcgctttccaatatatattctcgttttacaatattttcaacgcattttttccttttattaaggtccaagtaataagtagtagtaccggtggggaaagagaaagagagagaagcgcggccgcagcgagcagcgtcgtcagcggttggggcgcggacgagagtgagaggctgacgaggtgggcccgtgcgagccttgaccaatcggagttcgacagcagcctgcccccaaacccacgcacgctcatcacacagacacacacactctctgtgtctctcgcgtcgcgcccggccgtcgcctcccctccctccctgcaccgaccgatccctcccctgaacccctcctcacatcctaccacctctttaaagctacccagctacctgcctgcctcgcctcaacctcgccggcggccgcagccgcatagaccggaagagaaaggaagcagagatcggaggcaggcgaagatggggcgcggcaaggtgcagctgaagcggatagagaacaagataaaccggcaggtgaccttctccaagcgccggaacgggctgctgaagaaggcgcacgagatctccgtcctctgcgacgccgaggtcgccgtcatcgtcttctcccccaagggcaagctctacgagtacgcctccgactcccggtacggccacctctttgcttctgccgcccgcccgcccgccgcgcgccttctaccttcatcccctttcaattcctttcgattcctctatgtgtacgggcttgttgaatacatgcctgcctgcctgcttgcttgcctatcttgttcgtcatcacttgatccatctttcgtgctcatgctgcttttgccgtgtaagtgtgtatgcgctatgatatgccatggcatgccaccaacctgctggccgtgccgtggcctccgtttttgggtcgcagcagcagattcccggcccgaaagctcctgccgcgcttgccgtttttggccaccatggcatgctgtctggtccaagcctgcctgcctccccagtttcatctatgggtatcgccagcatgctgccttatttgctttctctctctctgatggttggtgctacagccgatcatttcatgctgcctgcgtccgttgatccgctctgctagctgcttgctgcctccttgtttcgggaaatctcgcccgcgcgcccgccattaattgctcaaaaatccgtggctgctaccttgcctgcgccacagttgcttcctttctttgttccctgcaactgcagatgcacatatacgcccttctcctttttggggatcagtgatgacgactccactcgtttcgtttcactaattaaactaatacgctgctgctgctgctgatgcagtggacggtggctttcaccggattactacgtcttaggctgattgcatcgcgcagtcagatcttgcttccacgccatatataatcttgcttgccagcccttgtgtgttcgttcttcgttcctgtcgtcgcccgatttgcacttcgcatggggtgttctacaccgggatcccgcaaatctttctcgattgacccgggcctcttcgatttccgctccgtcgtttaattaattaactaccgctaatcacatgcacatgcttgttcccattttttctccctataagcaaaagtatcacatgttccgaggagttcgtacccaatcacacacgcgtgtaataatccagcgttcactgaagaattctcactctttattctctctcttattaattaattcgctgtctagaaacacgagctgcatgctggcgtgattacttcagtcatcactcgctggctggctcaaaactactgatccaccctcgggtggaattggggaggtagatctggctcttccttacctgattcttgtgtcttcgctgtccctttctttctcttgcatctcttttcatgttgtttcaggtttgcaaaccatgcatcgtctctttagtttcgctttcatatctcctcctctttcatgaccgcgaggattgccgcgcgcctcctttaattttctttggatgtttctgtaaaaaacatttctgatcctccgttgatgactagtaagtagtacatgaggttataccaagtaatccagcggttcttgctgtctgctggatgatcatatatccacccaaaaaagtaacgagttccttactcctatgttgcaacagtatccgtgctgtactacaaatatagtaaagctgtgaggtagtacgtacttgagagttctgtttcttcagagtttcctttcccccggcccaccacctccatgttcttttcacatcaagttctattcattttccttccttctattatatagcacttccgtgacagcaggctgccaagggtaaaaatgcaatagtgccccatcgtgtgcgccatgatattctttgcatacactgacttctatgagaaaaaagctgcatgcatggacgtgttgcacactcatggaggcaactggtattcgtgtaattgagcagcagatcattttctccctttcttagctagccaggcgctggtgaaattaactacatctagtagctagctagtttgagtaacacggctagctgtgtattcatgaaacttgggtttgcctcggtcttggaactaagtaaaccattaagtaccttccatgcatgtactatatgatgtctgcataggagtttggattctacattcttcttttcacactcccaagacattcaacaactactaaaataagtgccttgctgtcagtctccggattgttgatctcggtttactggctaagatgaaatacatcattatttgccttactgtactggctaaaccagtatcacatgcactgtgtgcttcttaaagcatgccacatccatacatacctaattttcctgacttctgaacgatacaacatgcattgtttctatatcacttattagttttcttaacataaaattctacaaaagaagctctattatgaggatgttatgccggttgcaaagtaaactaggtctgtatactggtgctagctgtttaaatacacagttcaattcttgtaaacccagagtcccagacggtattttcagatctgaaattaagataagacgaaagttaatggcaattaactgatgcatcttttttttttgcaatacccatttattttgaagatactggatgttagcttacttgttggattgcatgtaagcatgtatcctggttgctttacaaaattttattgacgctgaggacatgtctctattgcaatgcaagataggtgacacaatactgtatgtacttgcatgtttgtgctttcttgcatgattgcttttcccgaaaaggaatacgccctcaaaatttacctatgccttgcaatgatctctggtgtaatgcatcaaccagtcactagattatttcaaggacttacagagaaaagatctgacattcttttttttttctttttttccagcatggacaaaattctagaacgttatgagcgatattcctatgctgaaaaggctcttatttcagctgaatctgaaagtgaggtgagatcacaggttgtgaaatttagcatgcaccttactttgtttcatgcgccaagccgccaatgcttcattaattattatcatacgttttgtatgagtaagatcgctctcgtgtgtgaaaatatgtgtaaattttctttttgtgtttttttgaacaaaacaataagcatcgttcaaacaatttaacttaattaaaggttgtagggtactaggatgaccttatattttatgttaaatactatcaactggacctttgaacgttcacatgtaaatgcaaagatgagaaactagttattgttctgctatacctgtttcttcaagcttacaaaactaactggtgggtggatcccaagtttggggaagtgtacgtacaggatgccataacattattacattttgtccatttgaagtcttgactcttggcagaacctggtaatttattcgaatgttagcattcaaataatatattattaaatgcatttcttgtgtacttttttatggatttatatacaaagttaatccttgactgcctgtagctgcattatattctaaacttatgttgcttgtatctatgaacacactgcaaagtgataacaatgtcatatagtcattgggcaaaagaagggacttggtagttgtgacttacatttttatggcctttgaactcagatgtatgtgggcataactaaaatttttctgcattttttattcagcaatcttgtatatttagataaatactagtgccacaattttagatgtacagtcataattttttttaaatgtgttccacaccctcagcgataactataaccctttataagattgctaatgcaagccatgcctctaaaaataataagctatgcccaatggttccatgtgtcatgtatgttttacatagtttgatcggaaaatgcaggagtaaatcaaaattgtcttgatttagcttgctgaagcaagtcaaaacattgcaagggaatatcatgttacaattttttattcgcttttgctctgaatattaatttttggttcttgatttctcccttagcataataaaagaaatattattgttttagcggaacaacatcaaggtacacaaagtactagaaagagagtcatgagcgagcgagacacatgtcgatagtcgtgctgaacctggacacgagtaggacacagtcagttagagagattcgagccacaatgtgtataataatatataataatctatatcctcttgctacttatcagttgatgaatacaaaagagaaaaagattacaagctaaaacaccagtaagcattatgaccatctagctccctttcacctcttggatatggtgaaagttctagcttaatagtcttcatccacctttatatctgtctaccggatgaactatatagtgtaagaatgtctagaaaaatatccagcgtgtttgtccacctgaattggttcctcacaaaatgttactcaacctttcccttttatagtgcaagggaaaaaggaggatacacgaacctcagatttcattgggtaagatccaactatctcattcttggggagtcttaccggggcccatgtctccgttgtggtatagtataagatatgcccttttcaagcggttgcaataactgcataggtgcagttatgatgcgttaggggtgaaaacgggtcatgtatacctattggataccgaatatagtacaaatacctatttttttaatatggattcgaatatttttatacttgagacaagtacaggtagtacctagataatgcaactttggatttgggtcagattagactgagggctacctggatattcgggtcatatacctaaaattgggtacctgttttcttttttctacgtaatattattgacaaaatcttaactttttttatataaacttggataaagataaagtttttatgaaaatcgtagagcttgaagagatctacatctttgtagtacattatttttttgtttaaacacattcacgttgaaatctttaaaataatatccaaatttatatcaaagtaacaaactatatatcacatgtgtaactttaatacttgatagtttattaacgttgttatttgcttttttaagacaaggaattggcgcttctagtaatttgcttagcctataatatatatactaattatgatggtagtacatataaacaattatgtcgacatgcctgtaatgttcacaattgatgataattggtattttcatacctaagttattattaaaagagtgcaattagtgccataagtgatgctttgagagagatggcttcgaagagaaaaactataattatggaattagtgacataagtgatggtatcttcaaccatacactgtataaactatttcttgtcaattttaaactatcattttgtgttgtattggactatgttatgcacaatttttaaggcggtaagacgtctaacttcctttttacctttaagcggtaaaagcgcaagaagaggcaacaacttaaatatagtttaaaatagaaaatattgatgaaaaagtgtttaggacaaaaatattaacaaagaagagaaaaaaagataaaatgaaaaagaacaatccatccagttcaaatcagtccagttgacctattaaaatttagttaatcccatgcttattaagccattgcttaagcgacgtttaagcgttaaggcacacgtaggcgacaaggcgtcttgctcgccttgcttgccgatgtaaggcacgacgacggaggttgtaggcacgcggcgctacggtggaggtcgcaggagcgcgtgtggtgtgttgagccgttgatgccgcaaccgagcttgcatgttgagcgtgagtgggggagggagtggaagatagcaccgcaccggtgttgcagcttggaaggcctacaattggtggcggctgctggagcagtgaaaaagttcgggtttgagtgtggatatggtggaacttgggtttgtactgagttaatgggcttctacatgggccaccaaataaaaatccatatcattttttcatttctttttcatttttcacctttcaaaggaaatgatgtattttttgagttatgtatgttagagacccattagagtgttttaggacctaattttgtgtgcaaatatatattatattataaattaaaataaacatcttgctttaactttacatatttttctatctttatatatgagtaaggcgtcgccttgccttatgccttttcgcttaaaaggtgaaaaggtggctgctcgccttatcgctttaataactatggttaaggccactcattccctctctcccagccctctccctccctccgagccgcaccggtacttcctactctttctagccgcactagtcgcctctctgtctctcatctcctagccctctttcactcctagccgcttctcccagtcgttgcctccgtgtcgccctcagctcctctgtgacgccctccgccgaatctcccttcacggacgcctctacgccaccctctgccgcgttgcagctctcagccgccttaggttctagagcaaagcaaggatgccttacctcctcgattcgccttaccgcctaagcgtcacctaggcaatgccttgaaatccttgattgtatgattagacattgtcatcttattttgaactattgtagtatttaaaaacatgcaaataattcatagactgtttgacatgtatatgatatcggtatgtatccactcaaataatatttgatatccattttctatcaacctacattatgtcttatctcgtcctatagccaacccacacttttacagctttactactcgaatccgatcccgaattcaagtgaaaaaattaggttaggatatgagacgacatgctatttgtccatatctatcatgttttcactcttacgatgcgtcatatctttgaacgtcagggcctgcccatttgcattttcaagtgttgggtgcttggggccccttcgtttagtatgatgtacttggtagctgatgtagtcttttgtacttgataatactttataataaaccgcgtgtgcatggatgattacatgatcgatgcacgtatcacatagtgatctcgggtaccctagagctaagtcgtggcaacaacacacttgttaagcttgtaatatcatacatcacatatttaatatatgttgtatctaagacttatcagttgagctaacattattgagttgttcttaggccttcagatgttgggtccttctcctgtggttgtactatcctagttatgcccaatcacacccttttgtcttgtgtgggattacacttagtcgcatcgtgtctcttgttctcatggggcttggtaccctgaaggttttagggccaggcggctctcacaatccgaggtcagggaccttaagaatcttagggccaagagagcccccctagcgttgaaatgttgtttagcgctctagtgaccaaaatgccttgggcatctatagggctagacaaaatcttagggcatctataccgcgtgttgtttagggcttgctcggttcatggtcggctcgactcgtttaaattttatcacgagttgagttgacatcccagctcagtttttttaacgagctagctcgtaagctcaaggagctatcacatttcagcaaaaaggaaactatatgcatattatttatgcatcaattaaacatgttatatgtatgtgtgatgtttatggcctttgatttaaaatgatgattaatgaactgtgtctatttgttaaattggtccatacgactgtgactgtggttaaatattgaggaatatgtgtgtaaattgtgcattgatgagtgataagatgtgttaatttggtgttgcattgatgtggtgtgtgacactatggtttggaattaaatagaaattaattattatatatataaattattttttctgatgtgactcgcgagcttaatgagtcgaatcgagccagctcgttagacatctatattttttcacagtgccctagggcttgaggagccacgttggcggcttttgagcaccctaggtctcgaggaactcaagggctttaatcttttattagcgtcatagggaataaggagcctcagaagctttagattattctatcctaggacatccaggcactatgagtttcagtccatagagtgggccctagcccctgggtctctttatggttctttacaagatttagtgcgtagctatcttttcggggcattttcatttcaagttatgcagcgtcaagcctctctatggagctcggaaaggtccctgagccccgaggcatggagccctatgatagctgattgttctgggatccttgaatgcgtcttggcaactgtcggaagtcgtataaccttcaccggatgttgacaatcatgttaatatggtcatcaaattaaagacacattcattaaagtttttctatttcctttttccattctcaatgttgattcataggtcttgttgcatacttgcatatatatgtggaaataacaacttttgtccaaagcaaatttacataggagcagaggagtctaatgttatgccctacatttcattccagattgatctttgcttaacttagaagaaattagtgtattctgatcatcatcaggctgtctctctgcctaagactgagtgactgacacaacgatacaatataaattttatttctagctttaatctctctagatgcttgtgttatatactatcagaaataagggtcgtcgtttcccttcgcgtatacaatgtcaacatgttgctctttcataaactagccatcatgtgattttctttactttagtccgcatcaacaaatcctggaattatcggcaatacttttatgacatttttgtctgttaaaataggatgattatgtttatagatgataattattctgttgatgacccgtatttgcactgagatgttcatcatgttcttatttctcattttgtctcaagtgcttatgcgttggaaacattcttttttatgagtcaaaatataattattaactttgtgcatattgtgtttatctgctcttcttgttctgtaaatatgatcatataaaaattcctatttcatctgctgacgagaatgcaagcgataatgtatttcaatgtaatgcaccaatattaagatgagcatatggtaattcctgaaagtattgtctacctttcagcttctatcttcaaatttcaaaactgataagtaggtgactgcagtggccaaacttatgttcaatttaagaaaaaaaggcttaacaagcatacatatgtttgtttctcactgctccgaggtcatccatgaccagctacttcctaaagcagttctcacagaatttattttcctattcagggaaattggtgccacgaatacaggaaactgaaggccaaaattgagaccatacaaagatgccacaagtaataactttggtgattaattgatttggaactagtattatcttgttactgtatttctaaagaaagtatcttgtaggcacctgatgggagaggatctggagtctttgaatccaaaagagctccaacaactagagcagcagctggagagctcactgaagcacatcagatcaagaaaggtagtagcagtagttttgcttaatttttaacctggaatctcttctgttcactgtatagccacaaagtcgtttgtgttactgctctaaatggtttgcttctgtgaaatctggtatgtattgactacactgacgacctgatccatgtttggatgtgcagagccaccttatggccgagtcaatttctgagcttcagaagaaggtataataaaaaaaaggctgaaaaactctcatggcgcagttgcacacgcaggcttacaaaacaaaaacagcaccggagttagttggccatttacctgctgacgacttgtggtttagaatgctctgcgtctgaacagccatcacggtaaattattgctcgtgcagaactgactgtttatactgttgtggtgtgcaggagaggtcactgcaggaggagaacaaggctctacagaaggaagtaagctgccagacgatactgccgcctcgttgcatttgcatcggcaacagaacagtttgatgtgtgtctcgtcttttgtgtagctttcagagaggcagaaggcggtcgctagccggcagcagcagcagcagcaggtgcagtgggaccagcagacacaggtccaggtccagacaagctcatcgtcttcttccttcatgatgaggcaggatcaacagggactgccacctccacaaaacatctggtacaattctatgctcacttctactagttcttacctcaactggtcaacggctcaacgccatattatgatgcatcctgcctgctggtattgcatgcatgcatcagcttcccgccgttgagcatcggagagagaggcgaagaggtggctgcggcggcgcagcagcagctgcctcctcctccggggcaggcgcaaccacagctccgcatcgcaggtctgccgccatggatgctgagccacctcaacgcataaggagggcgagcaaatggcgtgcgaagtgattgattgctcaccgttgattgaacgatagcctaagttcatggcggcagcaaactaagctaaaactattgttatgtttgcaaggaagggtagggtaacccgctgtgtaatctttgtccagctagcatgtaccaactgagatgcatgcatgcttattattgtccaattacccgtgaatctagcggtgcttttggtgagaggccggccggtcgggtgcagtttacttcaaatatggtttgtgattttgtgtaaatagtattaactaggagtcctatggtaagtaaattaattaatgggaggatgcatgaataaaacctctcttgtgctgcagattcatgagcctcatttttttttgaaagatcgagaaagtcaactgtgtaggggttgaatgagggacaattaaaat

SEQ ID NO: 15 - DNA, 9702 bp, Zea mays
aaggttgaaaagtctccaaaagcgccgagtaaaaagatctcgccccaacaaagggtacgaatacgatcacgcaatataagcatctctctctgctgcttaaagcaacccaggactctgctgcttagagctagagaggacacggaggtagagagagacgaagctagagggacgcaaaacaagctagctaagctaggaggaagatgggtcgcggcaaggtggagctgaagcggatcgagaacaagatcagccgccaggtgacgttcgccaagcgccgcaacggactgctcaagaaggcgtacgagctgtcgctgttgtgcgacgcggaggtcgcgctcatcatcttctccggccgcggccgcctctttgagttctccagctcctcatggtacgacgcacgcgcgctccggccagccttgtcctgccctgcatgcatctgatctatgtgtagcccgcaacacgcatcccccccccaaatgaacgatattaatatatactaaaggggagcacctgcactttgggtcttttttttgtttattttcctcattctcgttttcactttaagaacacgttttttattgttagatttgctctcttaatttatggcttgtaagtctcgcaattgctcatagatcttgttctttggaaagatctcttctccttttagtcatggatggatgctgtctttctgttcgtccttgtttagtttggaatttatggtcgccctctttggacaatttgctctcttccttcttggtctgtgctgattcgttttccttcttggctgctcatcatttatttgacagctactcttacgtatctcgtttggtccccgtgggccaggtaaccaagatctgggcacatgaacctagatcttcctctattaattgtgtcctattacttatgtatatacatcaccaaaacacgatatcacgaccatcctttgttcaccaaaagaattagtagcatatatatcctcgcttttgttgcttacagctcatcacctaacaaaacaagggaacatatccggtgcatattagacttttgtccacatatggtgtacatgaactaacaaagttcacaaaaaatctttaaaaattcatacatattcttttcatcatactccaattatattcaaaattttaagtttaaatccgttatactttagctataataaaaaagagaacattttagctgattttcaaatttaaacttgttgaaatttatcttttttattacagttgaagtataacgaatttaaacttgaaattttgtatataattagagtaaaatggaaagaatatgtatgattttttcagatttttttgtaaactttgttagtttatgtgcactatatgtgcaccaaagtctaatatgcaccggatagtttccacaaaacaaacttttttcttcagcacaactatgtctataattgctaaatatgcatacagttcttccatttaccaaggtagatctcgtgaacttgtcgtatagtagacctgtacctcaaacaagatttgagtttttcaacttgttctcttgcaataagaagcaagagtaaaaaaaaacatcagtgcattatttactaccttcttccttccctttttagcattgttgccagactgacagtgttgccacattccatatccagttatccaatcccaagttttatttttacttcatatttcatctcctttatttttgtcaactcattttatcttccaaacaagctgatgtgcttagctcaccggttcagtcactagagctgtaggttcagtcactggagctgtatgaagccctcagctgctgatctatatgctactgtttcattcgttactgttccatagagggtacatgggcggaacggtagctgatgctcgagacctcgaaatgctatctcgcatctttcttgagtcccgtgcagagtcatatcaagcagctcagcatatacagcatgcaatattacgaaggttcaacgtcatgctttcatccatgtgcgtaagctagctgcatgaacagatgtgcaggagcatttcatttcatagttttttttcctgaagaagatttgtctatcatatcagtgttttatcgaagttgtagaaagtagcatatatatctcgtcttcctctatttgtcttttcgatcttatgcattcaagatttttctcagttttctgttcaatatcgtttctctggttttctctgccattttcacagattttcatcctttttagtgactccataggtggagaatgtatggttgtatccctgcctataggtgattcgttagtaatatatattttttcatccagtaaaaaattcttgatgttttaagcaagatgcagtcaaactcttgaaagaatgtccatcaataagttagaacgacatttgtagtctaaaatgtaaaagtaacagaaatttgcttgaaaagaaaattcataatcataaacttatatgtataaccatgtttgaataaaaatataataacgaccaactacttttggctggacgaactactatacatgcatgtgtatatactctctaatcacaaataaaatgtttatggtcaaacttcaattttacaacctttgactatcgaaggttttactagctagatcaaatcatgaaatagtttgtgaatatttattttgaattttactttcatgatactatataagtttactagatttttctaatacattttaatatataacatttatggtcaaagttatattttatagaccatataggaaatgtcgtcattcaaacaatcaagcgttttcaacattatgtatttaagtgcatgtagggagtttgatcaattcggttgtagaagtgttgacataagtaataaaacaatgcataaaaggaaaaaacataacataataatttacctattaataccggtgtgacatggaaatatgtatatatgtacaactttatccacacaagatagtaatatatagtatatagagagctttgtaccatcaatacatcttcatattttattgtaattctcctatgattgttaaattattgtgtggagctagccacaaagcatagttaatatgtgtataaaaatattatatgcaaccactatagatagggctgataatgggctataaattttgcactataagattgaaggatcgaagcgggttaggatcgagctctatttctagtcatttttgagctataatttatttagggccttgacattttgtggagaactatttggatcacaatccattaccacccctaactatagatgataggaattcaaaaagatctttgaaaaatcatgctttacgttgtaagatgtaatttataaatttagataatagagtaagcatgcatatttgtacaactattgtaattaattgtttaaggcaatgttgtggttataggccatgtggtggcatatattatgtcaacaatggagcttgaccaaacaaggggagcagtctatataattgaggagtaaacactaaaatatcactatttagacaatggggatcacattgagaaagggtggctatgggctagctagtttggtcttaaccaagatcctcccctgtaattaggtgtgtggtgctgactaactgacatcctagtggcactaattattagagttctttgtttcaactttgtttttcacatgttagaaaatacaattatccaaaatctctttaactatatgtttttaatgtggacgacccacaaccttagagcgtcatgcattagaatatacaaaaggaactccaaactaactaatggattctagtacacccgccatattatatttgatattgcatggtcttccacatctgaaaggtgacttaattatttaaacacgggactacatggacataagcataaatgttgtattactatgattagagtaataaacaaccaaataatttgttttattctaagaatcatctaaaaatatttattctagtttccaacaaaaacaaataaattggtttccaaagtaaagtatattgttttgtttttgctagcatcctcaattcctcaggtatgtttttgctacataaattatattacgattgaggtctcaagaattttgagaagatactttagcatatctaagactttaaaatagatggcagctatcgatctatatgactgtttgaagaagaaaaagttcatatagttatattaactaatcatgctatggatcgggttacattaccttatttacttccactcaatattaaatatacaatttgtaaacacaagacaatccatcggttaggtgtttaattgaaacaccacaaatctaatgggtaaattaaatgcattttgtctaaatatgcattatagattcatggatagatttagcagacatgaaatcttgacataaatctcatggaagagttattagtctccggagtttctagacctagtagttttctaaaattacaatagagctcaatagtacagatatttacctttggattcattcatggataaaaggctgctaacacgtagtggagttctctggtgagtttcagtccaatatatgtaggttctttagtggagattgtagtcattttcttagatatttttatgaactatataccattattccattaccatggtctttcacaagtaaattcgttataatatttgtgtggcatacaatacatcatttgtgcttttacattcagtatttaagtattttatgctatgatactaaaagttcaattcactggtagtctggtactaaaccttcaattcacaatacaacgaaacgtcattgccagtttgccactcatggcctatggccctatgctataacatcggttgctgtgctgcacttgcaagtacgtaggagtatatgaaccctcaacttagttcctatatttgcgtttccactaccagtctaccatgcaagcagcgtttccactaccatgcaatgatgcaatgcctctctctctctcaccccttggttaatggtgctatatcagccctatgacatgctaacatgcacaagatcacacattttctgttttagtttcacacccaaatttggaccatgatggccccccgggagatatatggtctctcttttttgtcctgtaaaggggtgcaacctatttttctatagctgtcaatggcataaatagataaaaggattatctatgaacatagacacatgatgagaagattaaagagaagggaaaaaaggtgaatggacgaagcccttgtagtttgtaaatcagtctaagttgcaaacactctctctgcatgcgttacatagttgcatttagcacccccggcccagcatctctcactctgctgcaatctcacaagtcacacccaagagtggcacaaaaaggaacgagtttccaaatatataataactaactatatatttcaattattgtgcaagggtatttgcaacttagactcaaacctaggatttatcatatataagcgtacatttacattacacacgggaggtgtgaatggactgaactatgaaactataagcctattccctattcttgtatcgtgtggtgtcaaacacgccatgtcttctaaagagcaaatgctacttacaatttacaacatatagtacaatatggcattatttcttagaaatggtgcaacaattaatcgttttatgaatgacagtggccggccttgaaatcaaagaatgtttgtttgtgctactagctgtcgtttttcaaatgctgtcattgatcacttttgccttgtgccaacagcatgtacaaaacactcgagagataccgcagctccaactactcacaagaagtaaaaactccactggacactgaagtaagtgtaatgagttcttgacatcctttttcgacgtaacagtgcatttgtaaatttatttctgtgagcacataaatcacctgtaatatcttatataaacaagaatattgtagcaagctaataaaatactccctctgtttcgttttagttgtcgctgtatagtgcaaaattgaactattcagcgacaactaaaaagaaacgaagggaatatgttgcttgcttccagagccaccaatcgctcaaaaaatgaacaaaccagcgatctgctttatcatcggtcaagtgattatattcatgtattttccaagctaactgataccataccttatgtttaaatttctgttttttgaattcaggtagatttatttttcgcatcataaacactccaacaagtgtgaagacatccttgctcagtattgtctataccagggatagacgtatagccgtataggattggcctagcagcaggatcgaatatagtcataaagaaccgtaggaacatatatataaggttattctataataatctgaattactataaagcaaatatttcctataatctagctaattggtttagatggcattgaagtatcttgtcctatccgagtttatgtttttagatagacttgtgcgggtgctcgtacctccccgtttgtagacacaaatgtatgtgtgttttcgtgctggacatgtgctagtttatgggtgcaagtcattgtctaaaaaatgtttatgaatgttgtatatggacacatatactctctctgtttcaaaatataatttatttagactaaacatatatattcatctattaacttatgaatgtagtttatatgtatttttatatttattatcatttatttgaatgtggactgaaaaaacaggactataaagaactatattttagaactgagagagtatatgtttgcgatgtttctacgtgaatgcgcaagtatgcacaaattgtgctatcagaaaagaaactattctttttgttaacagacgtagttaaaattagagcatagaaccgtgggcagcagcactccggccagtggcatagtaaaattagagaaatttgactcaaagtaattagaaatgttcacattttggaaaggaggaaggtcctaattgcactatagccaataattaactgctaaaataaattgtagacattcaaacagctcaaccaataattcagtattagctagccttttagtaaagtcgtcaatagctagccaactatttgttaaccagctaattctactactagttttttattgagctaactagctctctagtgcattcaaataggccgaagtatatctccagcgctgtagagattcacttagttgggcttgggttggtcgttggtttgattgtcatcaatgagtaaacgaaggcgcgaaagtgaacattttttacatgtcagcttagaatttctctctctatagaatagaataaactagaagcataacttctttgttgctgtggatctttttttttcaaaattaaaaccattgcacatgttcttgtaattctcatatactctctttgtcccaaattaaaattcgtttttaaaaactaatagattcataccatacttgatttatatgttttatatatgtgtttagatttatcatcatctatttggatatagacataaaaattgagagctaaagcgaatactattttagaatggggagtattaaaaatagtgttggacttagtagaggtgatgcagatgtcttgcattcataggtttaaagttactggacacgtggtatccgtggaagatggtatggatagttagtgagaaatgatgtagtcatgtagagcttgtatgccgagatagattttatagtagagtttaaaaatctaagataacatatataaatatatattgcaatgaagatgggggctcaaattagctaccatttgtggccctgatatcaacctgacaggctgagcctttattttggtttgcaagtaagagactgggctgggggctggacaactgagccagatataaacatacctatcttcctctggcggagcccatcatatacaattccggcccatctctcttatcaaagtaatggatgcgtgctgctgattttgtggtaaaattttaagattttatttgtatcttttttaacctatagcatgcatcgtgaggatccatgtacaagctttgttgaaggtcttaacttagtaatattaagctccactcggtttctactgatttctaaagtagttcagtggtactggattctttttttatataaaaaagtagacgctatcttctattttctttagaactaggtttgtcggtttgtttggcaaacacgatctatgtactgacctgaactttgcgtattccctttttccaagcaggatctcacgttgacttactctgtttcgttgcgctctttcttttcaaaactagattaaataccaggattatctcaagttgaggacaagggttgaattcctccaaactacacaaaggtattcttcaaaatggcactgagctactgattgcttgtctgaggtgcacaacaattgctaatgagccaatgatgtatgacatctaccaccaattcatttctgcagaaatattcttggggaggatctgggtccacttagcatgaaggagctcgagcagctggaggaccaaatagagatatctctgaagcatatcagctcaagaaaggtagaacacctgactgcgtggcttacatatttcttcagtgcgctgttttggctcgcaattgacaagggctgaaatgtttgcagaatcaaatgctacttgatcagctctttgacctcaaaagcaaggtagcaatgacgaggtcctcttaccttttgcctagttttctttctgctccatgcatccgtaccaaaaccttgtagtgccgagctaacggttatgtttttgcaggaacaagaattgctggatctcaataaagacctaaggaagcaggtaatgcaatggcctccaaacatctctgtgtatacatacgtacgtaccttgatgttgagttgtttacacgcatacgtttcttagttcttactgtactctccatgagaacttggaacagcttttaaaccttttttttatataaaaacttttaaactgatgctatatttgtctctgttccgacatgcctgcttgacgtaaacttactggtccgttactgatttcttgcaagtggcagctgcaagaaacaaggccagagaacgcgctccgtgtctcctgggaggaaggtgggcacagtggcgcaagtgggaatgttcttgatccttatcaggggctccttcagcacctggacaacgatccttccctgcagttcgggtaagtttttccaggtgacaatgactatgatagatagaacaaaatatgcatagatgaaaacacacacaactatatattacctgaacttaagcaatcacaatcgcatcggagccagcctcgcatggacgagtccggagtccatgacaccatcacaatttcctgttgagaaatagaatccacattcagcacttgagctttagcatgctttcatcatatcttagccgcgttaatgagtgtgtgtgtgtgttcgtcctgggcaaaggtaccatcatcaagcctacatggatcagctgaacaacgaggacctggtggacccgaatgagcatggtcgatctggatggatatgaaatgctctgatgacccaaaataaagttgatgcacagcagggattcaccctgcaggacgcgagactatgtattgaagctaagacctcgtgtgtgttgtgttgtgtgcgaagcttggaactttataaatcgttgtcatgcccatggctttctatttctttctcggagctgcgcaaaa

SEQ ID NO: 16 - DNA, 8088 bp, Zea mays
ctatcctagcccccgtgccatcgctttcctctcgttatttagccctccgttcccgaccctcatcctccgctccagacttccagcatctccgctccggctgcgctctgccttgctttcctgctacctgctctagcgcgagcgagagaggtacggcggccgatctggcggcgcaggcggagggctcggccggggccggcaagtcggcgccgaacatggggaggggccgggtcgagctcaagcggatcgagaacaagatcaaccgccaggtcaccttcgccaagcgccgcaacggcctgctcaagaaggcgtacgagctctcggtgctctgcgacgccgaggtcgcgctcatcatcttctccaaccgcggcaagctctacgagttctccagcacgcagaggtatacacgcgcgcgcgcatgtactactactacccggcagcgtgcccgcggtcaccttgccgctgccgggcagtggtcacacggcgctggagtgccttggtctcgccggatctcgctagatctgcccgtgggatgttgctggatcgagcgtcgcgagcagtttctgtcttgcgcgaggcgagagagtcagagaggagagccgagagagctgccgtttcatgtggcttccggacacgggatccggctactgccacggctcatcttgggtttagttagggttttgcttttctggtcccttgggtagatcgacctctcgcatcacttttgtcgatcggcatcacgctgcgtcttgaattgatccgttggtcttagaagtgtagtcgcggctgtcaaagctcaactcttcaaattcatgacgacctgagcagcagcgcatgaattccctatatatggatctggttaaacaaaacggctcctggtttcagttactacagacgtagtccaaagtctagaataatacatgaagtttcagaagcatcaccttccttcttctttgttttatttttttaaagaagcatcataaattgacttttgtttgaactgaaaagtcgtctcaagtagtaggttcgtttatgggcctgtttggttcggcttttttctgacgagcttttctgaaaagctggctgtggaaaaaagctggctgtggcggattctggcgcccagaagctgtaagaatccgaaccaaacacagcgtatatatgatccaaaggaaaactcgaccaaagaaaagaaaaaaaagctttgacatatatctttatctatgctgttaagatgcttaagcatatcatgtaatgataaatcaattctcgaaattctaattcttccacgttgccctagagggtattcatgtcatgccacgttgctttattttcaattggtctgtctaaatatacaaataaactcaacattttcccctataataaacagtttctgtgggcctgcaaaatgaatcgtcaataaaatttgtttcctagattagcattgtatcaaactactctggatcaacttgtttccttggtcaaccatataaaccttggaaagatgatctagttcaatacttgaggctccattcaaagctgagccaaaatttggttgccacatactatatcatctctaccatgcatgtgtgcatttaattaagttggtgccatcattgtgtatcgtatgaaatgaaacaaggcgagagttaaccgtcatctcttccattatttgtacataattagacaagagtagccttcatagtactatgtaagaactcctagagctgtttttttacgctagccctaggggcaactagctatccactaggactcacggctcaggctgcggccaggataaaatgaatatatatatttggattactgctagcatatggtatagtccaaataagatggaacaaattaaatcattagctatcatattgtctggtgcattatacatgcatgcactaccttttccatgtttcatttgagaaacacagtccttggcccaaaagttaaaattgaagatcccttgaggtaaaacatcatgatataattaatatacctcggccattggcatagtaatgtttgccgatagtctttttaactaagctacctcgccatccttctatctcacgtctatatatagatcatctcctatatatccagtatcttgttagatcgacaccccttgagaattccacaaatatagtatcttatgtgggttgaatatttcaccttttgtccagcgtagtatatacttctgtatttactagccagatgaccgtgttttgctacgatttttatatatcatataaatagatatggagatatttattcaaatatagttattgtttatttctaaacactaaggtatgtataatctgatggttattcttaaatttttggagtaggagggtgtaggttcgagtgctcactctgcattattttttgcacgactacatggacggagcactattttttgcacggtgtggtagttacgcgggtggggtcggtgctaggcaagcgcattagctgactacgcagacactgaggtccacaactcagtagttgagagagcattgcacgtgcgctgggcgtggggcccacagggcacgacgccgaggcggggcgcgtgtggcgggcctagaatgtcagcgttgagggtgaatgcgtggttgcaccaagtatcacattaggtttttatagagtagtatatatatagatagggaaattccattttttcaaaaaatattaatatatttttaagctgtgggggtctcccctacagtctcttacagtaatttttttgtgaacccattaatatgttgtttgttttgttcttattatgtatgataactcgcgcaatgacttcattaattattaacagtagcaaattctaggtaacgttttcttcagtggaacttttatttgctgggtgcagtgagggtgacacatattcacatgcatattgctacaaaataaacgttggatttatctaagaaaaagacaactttattttttccaatatatacaactatacaagaaatgtttttaatcaagtttcctctcggattaagcaatttttaggtaatgggataaaaggacccgacttatgcctccataaaggctacagtcgcttattacagaacgtgataggaaaaacagctggtgtctcacacgacactagacccgacaccacacaacacagataaagaaatctaaaagcaaatcctataagtagatcccttgaaaaaatccgcatcaccaacaccaccatgttacgacaagaagtcttcatttgctcttgattgtcttccttatgctgaagctgagtccaaaagtggagccaatgtgtagttcggaataccagcataggagttttcaaaggagaattatcaaagaccacgtcattcttactcaactagagactaggagcaacattagtctcatttatacattcctgccattaagccaagaactaaaaatatgtgttacattgtgtggaggtcttactccacaccgtatttgaaacaatcgccataatttttttgcataatgacaatgaaagaggaggtgtcaatagttttttttctaccacaaaaagaacaatttgcattactcttccaattacgctttacaagttgtccttagtaagtgtaactccatggcataagtaccacatgaagaccttaatatttgggggcattttaatctttcatatatccttattcgtgacaatattatcatttgctaacaaactactccctccattcttttttatttgtcatattttaattcaaaaatgaactaacagacgacaaatatttgagaatggaggtagtattatacatcgattgaacactgaagataccactgctcatcaaattccatcgaaaagtgtccctttttattcaatagaacatgtgcaatttgtgccactagattcatccattggacccaatattgttctaccaatccatgacaaaaagaaacatttagaacggtgctaaaaacacttgccaccaccgtgttctttcgtcttactaaattgtagagttgtgggaactgatctttcaaagagaagtttctcggccatttgtcctcccaaaatctcacatgattaccatcattaagctgaaaggttccaaagctgaaaaatatcttattttactttcattagtccccccctaaatgtgaatcggttggccgcctctgtacctgaggtaaaatttggttttgtaagtatttctgcctaagcagtgtctgccaatccctcttcattcagcagattaaacaaccacttacttaataaacatctattctgtatatcaagattcttaatgcctaaacccccacatacttaggttggtaaataatattccatttgatgagcctatacttcttatgtccttccccttgccaatgttggctttattttcattcctctgtgttaagtttgcactcaatatttttcaatgacatgtgtgaattttctagatattagctgctgtatgcctgggttttcatgcctttcctatctgcagcatgccaaaaacacttgaaaagtaccaaaaatgcagttttgcagggcctgaaacagcactccagaatagagagaatgaggtaagatctttttctctagttaagacaagcgtggacaagttttttgcaaatatctatagcatcgatgtatactccgaaaaacattaatcaacagctactttgctactaagatgtttcatctacgaaatcacgttgtctaaataaatgttatcttcgaaatataatggtttggatttgtcatgtgtgaaacatgtacatatatttattattaaaaaaaaaatcaaaagtgcctcctgtacaaggctattcgaggagatttttgaataaaagcaactataaaagcacttattcttttaaataatagatatgaatatcaaattttaattttgatgcgaaatttcttcctaatgagtattcactgtgacacttttggagattgagcatatatgcgtattattctgtttcataaatagacccaaaccaagcaaataaaggaacacaataattgtctcactactttactacatttattcccttgtacgagaaatttattatattgttcacatatttcatgcgaggtataaaataatgcatgtgaaaccagtaaatattgtcatatataaaaacctattattgatttaaggacgtgctccacagccatagaccatcattagctgtattatctttacattcagaaatcagaactctagtagtaggcccttactaaaatcctgtgttgcacaccttagaagttattattgcaacataattgatgtagtggatatgctaccatgtaacagcaaaaaatgtcttgtaatgtgtgcgtgagcataattgttgatgtggtaatgttctatatataccatgtgtggtcttttgcaagcaaggaaatatatataagcatctctattcttctgttacaatttaaattatgtttttctagtgacaattatgaggcctaatatagagatcatcattgtgatctcaatatagtttgttgaacaaggcattcctgtttatgctaaacatacataatgacattttttcagcaactgaaaagtagccgcaatgagtacctcaaactgaaggcacgtgttgataatttacagcggactcaaaggtgagttctgttatacaattaagataaatttgttatttctgtacatacttaaaaatagcaatttatgtttgaatgtgctttgttttgggaaaacatgcttaaagcaaaatagcatggcttatttattcatctcaaatcagtaaattcatgaagcaacattgaatttaaattgaaatagtgcaaagctaggaataccaaaacgttcaatatattttgccgatatgattgttgtcctttcaaatataccatagaaactacttaatgtctctctggaacgaccattattgtgtagaactatatatcgtaactttgcaatataaaaacaaatgaaatgtggaatgtgctacattctgaaactaacatgcatgcaggttagtaaactgatgctaccattttatttacacataattagtacaggtgaaaatgaagatttctagtattgcctgaatatgtcgtctgtataacatttctagtctgcatcatatatttttattttaaaaaaggtataaatgggggagttagctcaatgcatttctttcagtgtaatcaaaggtagatggattcttattttgataaccaattaaaagttcgaatgttttactaacaatcccctcaggaacttgcttggtgaagatcttgagtcattaggcataaaagagctggagcacctggagaagcagctcgattcgtccttgaagcacataagatctacaagggtactgaaaagtgctaacaccataaacgaattatattgtatttcctgttttatatgaagaagtacatggaatatttaagttctcccttttgtaaaactgtgccgctagttttcatatatgtcactgctctctgatttcttaactacaatccttttctgctagactatgataatatgagttcgtggggagtcaagtttataaaaacggtgcatcagtgcatgtagcctctttctgagtatatgttctgacccagttcttttccttctctttttctcctgtagacacaacacatggttgatcaactgacagaacttcagaaaaaagtatgctattcttcatgatttaacaaaaataatattggtgacttcactcaagcaactttacttattcaatttgcaggaacaaatgttttgtgaagcaaataagtgtcttcgaagaagagtaagttgtaaaattcactgcatcattcaaacaaacatttttatgatgtttcttttcgggtccctgtcatagtatcactgcatttgtcatacataattgcaacaagatgaagagacatgtagtaacctagacagccatccagtttcctcataaatttctgagtttgaatagggatgcacatttctatacatacgggatcataattaaccacatatagggctggtttggtgacaaacgaattggaggggatctccaattcccttgtcaccaaaccaggccataaggtctcaggcagtaaggattatttaccttcttcattgttttgagatgtgcagctggaggagagcaaccaggttatatggcagcatgcgtgggagcaaagcgagcggcattctgaagtgcagccgcagcagctcaatggcaataacttcttccatcccctcgatggtgctggtgaacccacccttcagatagggtatggtcctcatatattttccgtgaatctctcttcctaccctaaatattgtgtaatactatttcgatgcctagctagcaggcttgggaagatgcatgaacatccaaatagtttttatcatatagaaatgatcttcaaactaaatggtgttttcttttaactagattaattttaccctatgctcgtttgatcgtcctataccaacgtacacgaccatcaaaatgataccttgtcctattattttcctgacggaagaaaggctaaatcacatgcatggtatgtcacaaactagagaacactgtgattgtaaattgttaaatctttaactacaaattaaacaagaccaatgtagtactgaactactgatgacaagttcttatcacagagtagctctttgtaatgaaatttaaaagctgattcgttcctccatttgtgcaatttgtttgcaggtatccttcagaggcactgactagctcatgcatgaccaccttcctgcccccgtggttgccatgagatcgaactactgcgcaattccgaattaataagcatggccgcatgcagctgcctgtgctatacgttgtgcttggagtgtactttaaggttcttgcatggcaagtatgtgtgtaacatttgtgatgaacatggaaactatccacttaattctcgaataatcaatgaactgggtaagattgtaacatagtgctttatgcctgaaacattaatttaggctgcgtgtgaatgatggaggttgtgttccgcgtgttcagtttactagtaacagcagtttagggttggtgaggaaagtgataaatttaagcagttttctagtaaca

SEQ ID NO: 17 - DNA, 11223 bp, Zea mays
aacccaatcgtctctccaccacccaactcctcctgcctgtgctctcctcctttttctccactccgcttttgcttggttccatcgggccggagaggagaagctagctaactagcagcagctctgttggtgtgtgtgtgtgtggagggtagctgcagctggggctagctggaaaggtcgggagccatggggaggggccgggtggagctgaagcggatcgagaacaagatcaaccgccaggtcaccttcgccaagcgccgcaacggcctgctcaagaaggcgtacgagctctccgtgctctgcgacgccgaagtcgcgctcatcgtcttctccaaccgcggcaagctatacgagttctgtagcggaccgaggtatacgcacgcacccgcgcgaccacaaaagcacatatatacgtgtggttcatgtgtacgggcagtggacggaggccgcagatcctctcggatctgacatccggggaagagttgggtggtggcgggagcttggacggtttttgagcttgtgtttaatttatatatgggagcgtagtttcatggggatctctggacgccacaggatggatccgtgcgagaccaacctagctcgtcgtttctcattgctgctgagctgtgtttcgttttttagggtttaatttgagagtacaagactggtgggttttttttagggtcctagcgttgctccttggtttgtcaagtgtgttgttatttagtagatcgatcgggtgagttctcgtttgctccaggagctgtggatttgtgttgaaacgactggtatggcgatgtcgcgaatttccagttaaattaaatcgcatatttgtatatattcataaagacatacataattcgggtgaccaaaagacgcggacgtactacacccagcgagtttgtcgtgctgtgcatagacacgtaagctttcatccggcatcgaatccggccgttttaatttgccagattttttatttgtttgttttggaccctatttggaaataatcttagcttagaagcagattatatatatatagttcgagcatgtatggacgtcgtcgtgttgcttattagtagctgatattctaattaatttagtcaattagtctcctgcaaaaattattttaggtccttttcacttctgagagaataaagaggatttttgttactgccaaatacatgagattagcacgatataaacattttctctgcctctgtccttcgcttggtaaaaattaggaacatacttttacggatattgtgttatgaaatttttttcagttgcagtgctttatagtttatagtctttagtgcgtgtacaaccatatttattaggtggtcttttaagaggtcttttagagttaattgaaaaaatataagagacagactctctacatgattcactatacggattgtctcttaactttatttatgatttattggcttagagttgtactatgcagttttgtttgttgtcttttatacttcatgttccacagttccagaactgaacagggcattagatctcaatctgctttgatcgaatgacctaacgaactattaaaattaatccattagcattattgttcaggtcaaataagccctctcacaagaatctttgtacgtagccaaatttagataattgtgtctatttttttcatttttgcgaacagaaaatataactacccatatctgttaataaatggaggagactaagatcaaatcataggactttgaaatataacttccatatttgtggttaatttgcctgtggacacacttttaaaatttctatgctccctaggaaaatctcataactttcacaaggactgaaattattttattaaaaataaagagaaaactagataattggcagtgttccaactctttgcttttggctaagtcttgagtcctgcagtattaaaattattgtttactttgtaatattatctcattgtatacaccttgtacacaagattccgaggattgacctggaggtataaactagggtacaatcaattgtcaggttcaaatgtcagtccttatgtccaactgtctcctcaccttttctaatcgaattgtcatttcagttcattagttttcaattccctttcccgcaaaattctccgaggcgaagttttatcatatgtcccttccaaggtctatacagttgttacctagtgctctactagtattttatgctgtcagatatgcacgcatatcttcaagatatactcgtagtatactagattttgtttactcacgtcatctttgtttctgaagagagtagttcttcctctcttttgttggaatgtcccgtaagcataaatcaggaagtttctgtaatatatataactgtgatagatgtaagttacattaattatatgaacatgaggtatcaataggaagataaagtaaaaactcgaaatgctgtacgaagccgttatatattttttattttggaggaattataatctacttaataaattatgctatttggtttagaattttttattccataacttttccaagttcgcatacaaacctgtcttagaattaaagaattgaaagatgaaaattaattctatagatcatcatgctatgtttgtactttgtaacttataacatacttctttacaatagaaatacaacatataattatgtctcttgtatggctaacaattaatagtatatacaaatatattccatatacaatcatattagctgaattaatttatgtctaaattatagttattagaatgaattaaattccaaggatccaaccggagcctaaggttgacaagtatatatgttaattgtatctagcttgtatgtaaccaaaaataaaaattcagttgcaaattatattaccctatttgagattgcttcatcttctccaagcaccacactgtgtaactatccatgctaattttgaacttgtagcatcacgagaacacttgagaggtacgaaaaaaacagttatgcaggcccagatactgctgtacagaacaaagagaacgaggtaattagcttgacacgtttattcacctgaatctacttctcatgagttctcttctgatttagtattttctcatgcaaatattctagagcgtgtttggttcccagacggaacttcaaatgctcgttgtggtgttgccatatttgcagcgccaaaaacagccaccacacacctgtggtctgtggcgaatttaactctgctgtagcttaaaaaatgtggcgtgcctaactttagttgcaatccaaacagaaacagctatgttgtgtggcagagtcgcaacttcgctgtcgtgcgtggtgtggtgtggtgtggagaaccgaataaacatgcccagtactcgttggtacaaggcaattttagattgatatattgaaatttatcaaattagctttatgagtggacatctaattgtgaaaattaaaagatactagtgactttgttctcatttgaaatatacaattactacaatacatatttgttttgttcaagtgaacatatcattgtgtagtgctagcaattccttaaccttgatacctttaaccatttgatcatttatatatagaagattgagttagaatcatggctataaaatttatatgatgtagaaaacacaattccacattgagctgttgtcaatgatgatagttcaaaatatcattattgtgtgtgaactaatcttccattttcatccctagtgcacagccactgtttacttttttttgtatattttgtactgaactacctgtcattttgcagttagtccagaacagccgcaatgagtaccttaaactgaaagcaaaggtggataatttacagaggactcagaggcaagttgagtctactcttgatttctatcttcatgacaaaaagaatttccttctcgtacccaattgaattgacgttaaccactagataacattgttacatatttggacaatttcatcaaaataagtttgtgctactatcattttcagtgtatgcgctgttaaccactagataacagcatcgatccctgcctagagggaaaatatctgtgcattgtttgtttgccctactttggtgattagctagtacaaatagatttcattgcatagataaaagcattgggtcttcgtcagcatatatgcacaaagaagttttttagaatcctcataagtcataaccctctgaattaggtatcaatttatggaggctaaatgaagaaaccataatttaatcacaatgaagttaaaataagtttcttaatgtgaatgtgtaatgcttagctaagatgcatgtaattgattttggctttattggctattacaggaatttgcttggtgaagatctgggttcacttggtgtcaaagagcttgatcagcttgagaagcaaattgattcatccttaagtcacataagatccacaagggtgactcgttgaacaaactatttcctaatgcgttaaaatatagtttttggacgaagctagtgttgacaacactgccctccatatttataattaatgaaccactttgaatatagagtactcttatacacgtgaccgtctgccaagaagacccagccatatataatctcctatattttccgtgactaatcttccttaattatgtaggggtgacatctgaaatatgtcgaatgatcatcattcatctcatataggcatgaatgatttagtattttgtatctttcaaatgttgatcaaacaattttctcattttgcagacacagcatatgcttgatcagctcactgatcttcagaggagggtatgctcttaacatgataaaatctaaagatttatatctttagatattttttggacgatttttgcttagataagagcataagtactgtttgaactacttaatgatatcactgaaccatgtccaggagcaaatgatgtgtgaagcaaataagtgccttagaagaaaggtatgcatgcgccttaccatgccccttagatgctgcaaacataatttacctggtctcgtttagatactcgggaaacattattttgtttttatgtcatgtttcgggttaaaacaaatggcgcatatatcaacgaataatttaactcttcaggttggcagatctgtttattagtaccatctctgtatttatatacttgcaaataagtacatgtgcaatcgacacattaaattgagtttccatgagcacaaatacgcattaatgcttggtgctgaatcaactttcattttatagtacttgttagaaccccagttttgattttggagttagcaccttataactattatcatacccttatgtaataggtgagggccaacaactcttgatatatataccctaatcagggtcagggttttccattccaacttggtaccagagctacttttctctaccctcccttccacccccagccgcaggctttcttccccctgtccggccgcccgacctccccgcttcccatgcttctgcactgcctgttcgcgccctccacgtcgctgatgacccggggtctgctcggatccgctcctccctcccgctggtgcgctcgtcggggacctaggaggctaggatgtgccccagatgcctgtgcgcctaggccttgcacctccctgtgtgcccgtcctcaagggcgtcgccgccgcttgggaaccccctgctcctccgccatcaggccatggagctcggccagggagacatacacgaccacgtcctctccctctggtcgtcggccttccaccttcgatcgttgcctctccatggagcccagcggtgcctctgccttctccatctccggcatcgacgcacacgcagaccacctcctccccacgaatggtcatgacgcggctctccacttctccatggtggttgtcggtctttaggccatcgccggcatcttcccctccacgctgggtcctctcgttgctgcgagcacgtccctacagcacgccgctacatggagcttagacgctgtcgcggcagcggtccccacccgcactgcccctgctcgcagcgagctcgtcggggacggggcctccttcatctctgtcactgggccccttcctggtgtcctccctgttgcccttactgcccagcaacagcagcagctatagatgtccaaacgggccacccggcccggacccggcccggacccgtttcggcccggtacgaatagggccgggccaggcacggcccgttgatgcttcgggccgggtcgggctggcccacgtgcctagagacatgcccaaacccggcacgcacagagaaaaatcgtgccggaccggcccgttggcccggtgggcctcaacggaccgggccgggcactggcccgaaccaacagtagaacggtatataaatacatatatttaataaaattaatcatatataataacatattatttatatatattaagacaacaaaatatttatgtatgcattttatatttatgtatgcattttatatatgtttggccgtgtatttaatatttatatactatgagagaattaaatgtatttacatatttagtatttacataaatatgcgggccgctgtcgggccgacccatttatcgggccgggccgggccaaagcacgcgggccgccgtatctgcccatacccggcccgctaaatgggccgtgccggcccgggcccgtaaccgaccgtaccgggccgtgtttggaccgggctaacttcgtgccgtgccacgggccaaacgggcagcccgcactgtttggacatctatagcagcagcacacctgacactaccccctcgtcgttcccgcagcgggcaccctccctagtggcgtgaccgcactcaccgacggccttgggcctgctcctatggttgcagccccttcggctcatgtgcctccctttttactgtcgtgtgcgtgtcttccttcacactggcccacttctccatggcactctcgtggcctttgatccgttcatgaaccttgttgtcttcctcccctcctagtggctctatcggagcccctcccctcgctctctccttgcaccccggtgccgtcaccactcaaatcttctcccaccaaatgggtggtcgacaacgaatcttccttccacaccactcataccactagatcgttatcccactatcatcctccacacccctcacatccttcctctatcatggtggggacgactccacaccctccttgtcacctcagtaggtgcaccgattcttccgggccctttctacctcaacaacgaccttgttgctccccagttgactcatccccttctcttggttcgtcgcttcactagtgaaaaccactggtctatagagttagatccctagggcctcaccatacgagaccttcccacatgtgtcgtgctcgctcgttgtggcatctccggccccctcaactctattcacttgccatctacttcccccaccagcgtatcctcctcccatgctcttgccactaccaccacctccaccacctgacatcgtcatcttgggcaccctggacatgacgtgatgtcctagctctacaaccgctcagatatctcctatcgctggggctccttcgagcaactctgtcatgcttgtcagctcggtcgtcactctcgtctttctttttccacttccacgtttagggatgctcaagcctttgatcttgttcattatgatctctggacttttactgtcctcatcctctctagttacaaatactgcctggtcattttgaataacttctctcacttcctttgaacttttctgattcggttgaagtttgacaccttttccaccctcacccacttcttcgcttgggtctccacccaattctgtcgctcggtttgtacccatcaatgtgataatagtcgagagttcgacaacacctcctctcgctccttactctctcatggcgttcaattgcgcctctcgtgcccttacacctctccctagaaaggtcgggacgaacacatcattcacgccaccaccaacatgatatgttacctcctctttcaagtgtctctccctatcagttactgggcagaggccctaaacaccgctacccatctcctcaatcgcctttcctcgaaggcagtgagccactccactccccactttaccctatatggcacaaccccctcctatgaccaccttcgtgtctttggttgtgactactatcccatcacctctgtcactgctccccacaagctctcccatcgctccactcgttatcttttcctcggttactcctccgaccacaagggttattgttgtcttgacctcctcactcattgcatcctcatctctcgtcatgttgtattttataaagttgtctttccccttgctggctcctcacctaccgatctcaactctctccttgagttcgatcttgtttcccctccaccccgatcgcctttgattgcacctctacctgtgccacgcgtggcccagatgccatcgctcccatctctactcgcgtctatgccagccccctatctggcccgcttcgtagaccccaccctcgtctagcatcgtcgtgagcgaaccgctccctcgacccactgatccacctgctcgttcctgcacgagcccctggtgtaccacccagtcaccatccaccgtgattccagccacatccacctaatggtgactcgttgtgccaccggcgttctccgtcctgtcgatcgtttggtactcatggccgaggctcctccggacgcctccctagttccctcctccgttcgcgtcgctctcgctgatcctcactggcgtcgcgccacagaggagtacatgaccatgctggccaaccacacttggaacctagtgccacgtccactaggcaccaacgtggttaccagaaagtggatctttcgccacaagcttacctcgaatggctagcttgatcgctacaaggtctgttctatacttcgtggcttcacccagcgccccgtagtggactatgatgagaccttcagcctcgtcgttaagttcgctaccattcgagtcgtcctctcccgagactgggcagtccatcagctcgatgtaaagaatgacttcttccatgacactctgacagagacggtctactgtagccagtccatcggctttgtcgactccgctcatccagatctggtgtggcggctgaaccggtccctttatggcctcaagcaggcatcgcgggtttggtacagtcgcttcgcttcctacttgggctcgctcggtttgtcgaggccaagttgtatatgtacttgttcatctacaggtgcaacgacgacaccgtctacctactactctacgtttacgacatcgtgctcacgacgtctactgcatatcttcttcagcgcacgatcggcgcccttcagtgggagttcgcgatgaagtacttagggcctctccaccacttcctcgacaccactgtcgagagacggacttagagtctcttcctccaccagcgccactacgctctcgacatcttgaagcgggctagcgtgcccgcctgcaagccctgctccacgcctgtcaataatcaggcgaagctctctaaggacgacgggtcccctgtcgccgacgtgatgtcctaccagagcctgatcggcaccctccagtacctgaccttctccaggcccgacatcgcctacgccgtcaagcaggtgtggctccacatgcacaccccgtgggagcctcatctcactgctctcaagaggatcatgtgctacctctgtggctccctcgactatgaccttctactctgaccctacccgacgtcggagctcgtggtttacaccgacgttgactgggttggctgttccgacacacgtcggtccactttcggctatgtcgtgttcctggacgccaacctcgtctcctgagccaccaagcgacagcccgtcgtctctcgctccagcacagaggtcgagtaccgcgctgtggccaacggcgtggcaaaggcctcctgactgcgccagcttctccaagagctccaaagcctctccaacgtgccacccttgtctactgtgacaacatcagcgcggtccacccctccaccaatcccgtgcaacatcaacgcatgaagcacatggagatcgacctgcacttcgtctgcgagcgtgtcgttgccagtgacgtttgggttctcagcgtccccaccacgttgtagttcgcatgtattcgccgattttcgattccgtctcaacatctgtacatgatagagttgagatagcggagatgttagagcccaggttttgggattagccccttataattactgtcatatccttgtgtaatgggctaggcccaacaatggtctatatattcaagtcccaaccctatctagtcatggtcagggtttctcattccaattgtagtgtgttaatatttctctgaacggctttttgtaccccaggatgttttacatctttgaataagttttgcatatgaaaaactaaatattgtaggtcaactgcagcaatataactgaattcgtataataaagcctttttaaaatataaatttgctgtctcactgagtcatcatatcatgatttcaaagtggtggcgcctcgatttatctctctggcactagatctacctttaatgaggtttcttacgtgattgttttgtaaattaaagctggaggagaccagcaaccaggtgcatggccaagtgtgggagcacggtgccaacttattactcggctacgagcggcactcttcaccacagcaagccccatcacatgttggcaatggattattctttcatcccctggaagctgcagcagagccaaccctgcagatcgggtatgtcgtgttcctgcagatgcgtcctggattcggtagatcctagctgctactttaaagcgcagcccggcctgtgcatcgatttgatcctgtcttcttcttgtgtgtggcatgcatgcatgtttgcaggttcgctcccgagcatatgaataatttcatgccggcatggctaccctgaagatggatctttgaggcaaagggaataaataaagatgcgatgcatgtcagaatcatattgtactgcaagagtgacaattgtgtgttccactcacatatatgacctagttttgtgtgtctatatgtcgaaaccatatgtctgtgattttattatatgtaatgtaagcacagatgaaacatgcagggctagttgcttttgcttgtctatgtatctgtatctggctgtgcgccactggatatgcgtcctagaacaccgcctccaggcttca

SEQ ID NO: 18 - DNA, 32691 bp, Zea mays
  misc_feature (1117)..(1216): n is a, c, g, or t
  misc_feature (7821)..(7920): n is a, c, g, or t
  misc_feature (12501)..(12600): n is a, c, g, or t
  misc_feature (13389)..(13389): n is a, c, g, or t
  misc_feature (19167)..(19266): n is a, c, g, or t
  misc_feature (22343)..(22442): n is a, c, g, or t
  misc_feature (24667)..(24766): n is a, c, g, or t
  misc_feature (27255)..(27354): n is a, c, g, or t
  misc_feature (29804)..(29903): n is a, c, g, or t
tgtcgacctaacctatcgtcagtgccctgcggccggtggaaacgaaacctaggaggagcctagtggccacctagggtgaggaaaactgaggacgcgaggcgagagcgagatccaatctgcacccccccaccaaagaaagattcttccccgccggcctcgctctctcaacatccgtctcgctccttccaccctcgctgcgcctcaggcagcgagcgagcatatagcagcccaccacccacatgccgcagggccctcacccgtcgagccaattgagtggcagccagaaaaacccagagcgcgagcagcgagcgagcgcgggctcctgtgtgcagtgtgtctgcgctagagggcgaagggcacggaccgccttcgtcaataattgcggtacgaacggggcaaatccgtcgtttaaagaggtcgctgatagcgcctgctggtggcgagagagagaaagcagcagaatcgctgagggatcgtcgatccggagaggcaaaaaagccgagagatcaggcagggcaccatggggcgcgggaaggtggtgctgcagcggatcgagaacaagatcagccggcaggtgaccttcgccaagcgccggaacggcctgctcaagaaggcgtacgagctctccatcctctgcgacgccgaggtcgcgctcgtcctcttctcccacgccggccgcctctaccagttctcatcctcctccaagtaaccatacaaaccctattacacatatattcgcttcgcttcgatccgattcccctctctcctttttgttagccactaatccttcgtacgtgtgattcgatctgggttttgtttggccgttctcatcacgcttacgtccttgcataaaatcataggtggcggtggcgctttaatttgctgttttccccccttattcttttctgttctattgggcaacccgttcagcgcgtacacagtactcgtattttcagaagctagtaggttgcatagaaagtctacaaacggccgggggggggggggggggggggggggtccgggcgaaggcgaccgaggaggtcgacacgatgtatgcggtctaccggtcaccggtctgcgtctactgtgtgtgtgcactcctaggaaagccttgtcnnnnnnnnnnnnnnnnnnnnnnnnnnnnnnnnnnnnnnnnnnnnnnnnnnnnnnnnnnnnnnnnnnnnnnnnnnnnnnnnnnnnnnnnnnnnnnnnnnnnagtatctagagattcgtcctttggggccagacgtttgtcgatagaagctgcgtctgcccgatggaggagggagagagggatgggttgttcgagctcgatctccctcgggatcagcctcggagactagggttgctggactggaatctcgtcaaagcaaatccttgtggggtggtcttcattagcttgaaatttgttttgagccctctgacatgctttttttttatttctaacctgctgcttgcttgtagttgtgtttatatttgtaaatttcagtttgcttgccataccccccccccctctaggcgactttcaacttgcaatgggttgtctttcatctagatcatgtgtaaggcgactgacataaaaaacaggtggcagtgcagatgacataggattcatgatttcttcatttatcctctcttcctcttgttcttgaggtgtcggcgcttgagtaacatccggagataacgaagaagcaatattttttgtttctttgcagcatgattgtgaaaaggagagacaatatatctctgcttcttcatatttcagtcactacaaaaaattatattgaatcaacaatcaataatataaatatcaagaataatatatatacattgcactatagacaaaaatcaacaataatatatatatatattattatctgaccggctgggaacaagacgacaaccaacaggttgaacaatcaacggtcgaatgacgtctcagctcagtcagcggcatcgctaggacgctagagtttcttaggttctagaaccgagtagccggcgtaaaaaatcctcaagaggtatgaatcctcttgctgctctgctgttgttgttcttctaggtcggctcggcagtggacaacggactagcgcctagccggcagcgacggcagcggagctaggaccagccggccagggcaccgagcgccgctcgacagtggacaccattgcttgctctcgtctcaagcgctagcgaaggcgaaggaacgcggaactgaaacattgcctggtcgcctggacgaaagctgaaagatcatgcctacaagttggaatagaatggatgcatgtgaacgaggtggggtcctcgatagacctggcttaggatgtgttagggcccacctggacccctctataggtccaccccttctcgctctctttgtctctcgtctctctcacgcgtgacacctcctctgtcactagagttggcattggaacctggtccccgattttccgtggaaatttctctattagaaaattgatatatggtaatttagttcttaccactatcgaaacaggaaaaatttagtcttcgacagattcgcaaggacagagatagagaaccattcactgtttaccatgccgtgaacttgtattgatctaaattagttcggtgacttgttaaaattgtactaaaagctaaatacttaacatattaaaaaataacaaactaaactctaatgtaaatatatcttataattttaaattttggttgtttgatttatattgatttggtacaattaatttgaatttatctttaaatattgcactttctagcgaggatagattctccgcgagataaatttctcacggggacaacataagagaaaaaacttacccataaaagcgttcttgagatggagacattttttctctgcacggagacaaggatgagaagacattcccgacaaaaaatttacggttgccatccatagctactagtggccggtacacatcactggtgcctgctgtcatgtagtcatgctcctccagatcaagctctgttgcccgcgctccatagccacgcaccacgtgctaccttctcagtaggcttgaacgccgccaactcccctagtctcgcgtcaccgatagcgccacgcaccagtcgtcgctcgccggtcccgagcaacgctagctggcttgccgtgttaataagcccgttggcgccttgtgctgttggctaccttggccatcgtttatagcgttgccttgattgtcattcatggcgttgccagatgcatcaacgatgcaaagacactagctcggatggagtttctggtttgttctatacgaacttgtttttcatatttatattagatattttcgttgaaattcactgaaaattgtcattgcgtgtagggatgaaaacagacacaaaaatacttctttcgtttctgttttcgcttttttcactgtaaatgaaaacgggtccagaatagttggtaaagaaaacgggagcgtataaacgagtgtatggaaacggaaactcataatttagtacaaacatacataatattgatgactaaataatgattgactaacagtgcaacaacaggaaacaaatagatacagaggggccacacttcattgttgttagcttgctagtggtgaatatatagttatggtcggtgttgtttgagtctttaggtcatttatcattgagaagagtctatggctagaataacctcttgtgctataatttaccatataaggatatgtggctataactaatgcactaatgcatatttggtcgatccggggtaaacgcaacacaagagataaggcttatcttatctagttgttaggcaaaacgtgagaaagaaaaaataaatctacgatgcacgacgcatgaaactcgtgctttaaaggactagagatttgttagacatggtatgttttatgtgttttaatctatatatatatccatgactccacgttatgttataaaagttaggtttttttcatttgtgttttaatctagaaaattaacattaaataactagtgacagtacaaagttgcgtgtttacatcaaatatatctgcaacgatgacaaacataattataaactattgaacataagtaccataccctaaagcagatatactgctaggccttgattggttacctgtggagcttagccaggcttgcacctgccaaccattctcgctacggccaagtgcagatggtacaagaggcagatatttggtaggttgaatcaaacaggacagatagacaacgttgttgtttaaatgtgtgaatggaccaattttttggttggaaagccaaacaaatcggttgtcggttgtgtgtggttgtgcaacacgagctaggcccgataaaaacaagattgattttcgtttccaagcaaccaggctagaggagcacttttgcatctgtagaaccaggcccaaacaagtatacaagcaatcaatcatcctttttttcatctcaccacccaagttgctctgtatctagggaaccattcacacacttagttgatgtagtcatcctgactgatgcaatacaaataatttagcagtgtcgatcaagcagttgtgttaaaaacactcccaaaaacgtaatttcccacctaagcaagagtacatgaggctagagtgtgttagtgtgctttgaggagagagggttgtttgctccttttataggtgcacaagaggcttggttcattaaacctagatgctcttggggaggctctgatagccataactccaacatcatcaattttgtaggtacaggtaacgcccacttctataactgtcattctacggttactgataatgacttggtggtgccaaagacatggccacaacaagagcaacctagcacacaagcaatcatagtatgtgttgcctcaattttcagtatagtatgatgtagaagcaagcgattcagatggccatgaaaataacaatcataggctacatgcacgagattaacctgattgcggctaaatattacacattgtgagtgacatggtgaaagggaaatgtgcccttgggccatttctaagtattttggtgattaagtgtccaacacaagtgcctaagtgttaaattgtgccaaggactcaagaagtgcaaatcaagattaaaggtatgtttctagacttagtacattgttttgaagactaatgtattgtgtctaagtgctagaaacaggagaaacaattatggagaagttggctgtgtacagccaaaagactgctcggtctgggtgcaccggacagtgtccagtgccccaggctggcgtcggtcaactggctgctctcgggacttcgacggcggtgtacgactataaatcactggactgtccggtggtgcatcggactgtccggtgagccaacagtcggcccggccaacggtcggccgcgtaatccgcgcgcgaagcgtggcagagccaacggtcagaagggggcaccggactgtccggtgcgccaacggctctgaaactccaacggtcggcttcaccaaagaaggaaagaaatccgcaccggacagtgtccggtggtgcaccggactgtccggtgcgccaggcgacagtaggcaagaattgccttcctggaatgctctcaacgactcctagctgccttggtgctataaaagggacctctaggcacatggaggagaacatcaagcattcctaagcaccaagactccaatttcgcgcatttgattcgttgtgatagcaactagagctccatttgagtagaaaactctttgggttgtgttgtgagctcgagttgtgacttgtgtgcgtgttgtgctctgattttgtgtcttgtgtgcgttgctcatcccatccttacttctgtgcttctttgtgaacatcaaattgtaagggcgagaggctccaaagtgtggagattcctcgcaagcgggatatagtaaagtgaaagcaaaacaccgtggtattcaagtgggtctttggaccgcttgaaaggggttgagtgcaaccctcgtccgttgggacgccacaacgtggagtaggcaagtgttggacttggccgaaccacgggataaaccactgtgccatctctgtgttgatctccttgtggttattgtgttttgcaagaactcctccctagccacttggctttattgtgctaacgcctaatcaagttttgtgggattaagtttcaagtttttacaggatcacctattcacccccctctaggtgctctcaattggtatcggagccgttctcttcacgtgagggattaatcgcccgaagagatggatcctaagggcaaggggatggtggtcaatgataaggagaaggagtccttcgtcaatgatccaaaggatgacaagcctactgactcgggcgcgagtcacaaaagaaaagacgggaagaagaagaaaacgaggtgcatcaaggagatcgtgtactacgacgacagcgacgagtcctcttcttcccaaaaggacgacgacaacgactacgagaaaaagaagacggttaattcaaatttttcctttgattattctcgtattccgcaaagttccaatactcatttgctttccatacccctcggtaaaccccctcactttgatggagaggactacggattttggagtcacaaaatgcgtagccacttgttctctctccatccaagtatatgggagatagtagaaaatggaatgcactttgatagtacggatagtcccatgttcatcaatgaacaaatccataaaaatgcacaagctactactgtccttttagcatctttgtgcagggaagaatacaataaggtgagcggcttggacaatgccaagcagatctaggacaccctcaagatatcacatgagggaaatgacgtcaccatgctcaccaagatggagttggtggagggtgaacttgggagattcgcaatgatcaggggagaggagccaacccaaacgtacaaccggctcaagaccctcatcaacaaaataaggagctatggaagcacacgatggacggatcacgacgtcgtccgcctaatgctaaggtcttttactgtccttgatccacatcttgtaaacaatattcgtgaaaatcccaggtacaccaagatgtcgcccgaagaagtacttgggaagtttgtaagcgggcggatgatgatcaaggaggcaagatacgtcgatgatgcattgaatggcccaatccatgagcctcaagccattgctctcaaggcaacgagtagcaaggaggcgctacctagcaaggtggcgcaaattgagacggcggggctaaatgaggaagagatggctctcatcatcaagcgcttcaagacggcgctaaagggccgcaaggagcatcccaacaagaacaagacgaaggggaagcgctcctgcttcaaatgtggtaagattggtcattttatcgctaattgtcccgataatgagagtgatcaggaaaagaagagtggaaagtgggaaaagaagaagaactacaagaaggcaaagggcgaggcacatcttggaaaggagtgggattcggattgctcctcgtccgactccgacaacgaaggactcgcctccaccgccttcaacaaatcatcccttttccccaacgagcgtcacacatgcctcatggcaaaggagaagaaggtatgtactcgaaagtctacttatgcttcttctagtgatgatgaatctagcgatgatgaaatagattactctagtttgttcaagggcttagatagaactaaaattgataagattaatgaattgattgatgctttcaacgatgagaatagattgttagaaaaacaagaggatcttttgtagaagaacagaaattgaattctccagatcctacctnnnnnnnnnnnnnnnnnnnnnnnnnnnnnnnnnnnnnnnnnnnnnnnnnnnnnnnnnnnnnnnnnnnnnnnnnnnnnnnnnnnnnnnnnnnnnnnnnnnnccggctcggataatcagcttgaattcgttttgcgaggatctccacactttggagcctctcgcccttttaatgtgatgttcacaaagaagcacagaagtaaggatgggatgaacaacgcacacaagacacaaaatcagagcacaacacgcagacaagtcacaactcgagctcacaacacaacccaaagagttttctactcaaatggagctctagttgctatcacaacgaatcaaatgcgcggaattggagtcttggtgcttaggaatgcttagagaatgcttgatgttctcctccatgtgcctagaggtcccttttatagcaccaaggcagctaggagccgttgagaacattccaggaaggcaattcttgccttctgtcgcctggcgcaccggacagtctggtgcaccaccggacactgtccggtgcggatttctttccttctttggcgaagccgaccgttggagtttcagagccgttggcgcattggacactgtccggtgcacaccggacagtccggtgcccccttctgaccgttggctctgccacgcgtcgcgtgcggattacgcggccgaccgttggccgggccgactgttggctcactggacagtccggtgcaccaccggacagtccggtgatttatagccgtacaccgccgtcgaagtcccgagagcagccagttgacagacgccagcctggggcaccggacactgtccggtgcaccaccggacagtccggtgcacccagaccgagcagtcttttggctgtacacagccaacttctccataattgtttctcctgtttctagcacttagacacaatacattagtcttcaaaacaatgtactaagtctagaaacatacctttaatcttgatttgcacttcttgagtccttggcacaatttaaccttaggcacttgtgttggacacttaatcaccaaaatacttagaaatggtccaagggcacatttccctttcaatcttcccctttttggtgatttatgccaacacaacaaaaagcaactaaaagaagtgcaacatcaatgcaactgagaacacaaattagttttgattcaaatttggcatatttggatcattctttgccaccacttggtttgtttttgcaaatcaacctcaatttcctatctctaagttaaatgcacttgttgaggcatagagaaaggtattccaagagaaattgatcaaagtttcaaaaactcccccttttcccataatcaaacattctccccacaagagaccaattttgacaaaaagagacaataagagtattttgacaaaacaaaagctctaactctactattttttcaaaattctcaagtggtagctgatccatttcttgctttggccttattttctccccctttggcatcaagcaccaaaacgggataatttggcccttaaaccccattgcctcaccaaaatcttcaactaagagtaaaaaggcaataagagcatggaaatgaacttggagttagttactctttcatcagagtgcagtggaagtctttcatggtccaagtccaacattccctttcaatccacctttgagactcctttgttgaggtcaacatgtccgtcggttcccattggagtctttgcgggcttggcgtccttcatcccaaaccgctttagcaagtcttgcgtgtactttgtttgggagatgaaggtgccatccttgagttgcttcacttggaaccgaaggaagtagttcaactcgcccatcattgacatctcaaatttttgagtcatcaccctgctaaactcttcacaagacttttggttagtagaaccaaatattatgtcatcgacataaatttgccacacaaataagtcaccatcacatgtcttagtgaaaagagttggatcggctttcccaaccttgaaagcattagcaattaaaaagtctctaaggcattcataccatgctcttggggcttgcttaagtccatagagcgccttagagagcttacacacatggtcggggtaccgttcatcctcaaagccagggggttgctccacgtacacctcctccttgattggcccgttgaggaaagcgctctttacgtccatttggaacaacctgaaagaatggtgagcgacatatgctagcaaaatacgaatggactctaacctagccacaggagcaaacgcctcctcaaagtccaaacctgcgacttgggcataaccttttgccacaagtcgagccttgttccttgtcaccactccgtgctcgtcttgtttgttgcggaacacccacttggttcccacaacgttttgcttgggacgaggcaccagtgtccaaacttcatttctcttaaagttattgagctcttcctgcatggccaacacccagtccggatctagcaaggcctcttctaccctgaaaggctcaatagaagagacaaaagagtaatgctcacagaaattgactaatctagagcgagtagttactcccttgctaatgtcacccaaaatctggtcgacgggatgattcctttgaatcgtcgttcgaacttgagttggaggggcttgttgtgcttcttcctccattacttgatcatctcgtgctcccctttgatcacatgcctccttttgatgaacctgttcatcatctttagttgggggttgcaccattgttgaggaagaaggttgatcttgctccttttgttcctgtggccgcacttctccaatcgccatggtgcgtattgcggccgttggaatatcttcttcatctacatcatcaagatcaacaacttgctctcttggagagccattagtctcatcaaatacaacgtcgctagagacttcaaccaaacccgatgatttgttgaagaccctatacgcctttgtatttgagtcataacctaacaaaaacccttcacagctttgggagcaaacttagaatttctacctttcttcactagaatataacatttgctccaaaatacacgaaagtacgaaacattgggtttgttaccggttagaagctcatacgaagtcttcttgaggaggcgatgaaggtatacccggtttatggcttggcaagccgtgttcacggcttccgaccaaaaccgctcgggtgtcttgaattctccaagcattgtcctcgccatgtctatgagcgtcctgttcttcctctctaccacaccgttttgctgtggtgtgtagggagcggagaactcgtgcttgatcccttcctcctcaaggtactcctccacttgaaggttcttgaactcggacccgttgtcgctccttatcttcttcaccttgagctcaaactcattttgagctctccttaggaagcgcttgagggtcccttgggtttcagatttatcctgcaaaaagaatacccaagtgaagcgggaaaaatcatcaactataacaagaccatacttacttcctcctatgcttagataggcgacgagtccgaagaggtccataagaagcaactccaaaggtcttgatgtggtcatcacatttttggtatgatgagagcttcccacctgtttacctgcttgacaagctgcacaaggtctatctttttcgaaagtaacatttgttagacctatcacgtgttctccctttagaagcttgtgaaggttcttcatccctccatgtgctaagcggcgatgccacagccagcccatgctagtcttagcaattaagcatgcatctagactggcctcctcttttgcaaaatcaactaagtagagtttgtcgtctaatacacccttaaaagctaatgaaccatcacaccttctaaagacagacatatctacctttgtgaataagcaattatatcccatattacagagctgactcacagacaataagttatatccaagtgactcaacttaaaacacattagaaatagagtgctcggatgaaatgacaatcttccctagccctttgaccttgccttgattcccgtcaccgaatatgattgagtcttgggaatctttgttcttgacgtaggaggtgaacatcttcttctcccccgtcatgtggtttgtgcatccgctgtcgataatccagcttgatccctcggatgcataaacttgcaaggcaaaattaggcttgggtctttggtacccaactcttgttgggtcctacaaggttagtgacaatatccttaggaacccaaatgcaagttttatctcccttgcattttgcccctaatttcctagcaatcatctccttatcctttctacaaatagcaaaggaagcattgcaagcatgataaatagtagactgttcattaattttcccaggaacatgaacatttctcctaggcacatgatgaatgacatttctcctaggcatatctctaccatgcacattggaagaacttggagcaaacatggcatttgaaacattacaactcctatgaacatttctagaatatctcttatcgccataaatgaaagcatgattcttttgactactattagtcacaggagccttccctttctccttggcgggaatgggagtgttatgacttgttaagttcttggcttccctcttaaagccaaacccatccgaagcgagggaagtctaccaatnnnnnnnnnnnnnnnnnnnnnnnnnnnnnnnnnnnnnnnnnnnnnnnnnnnnnnnnnnnnnnnnnnnnnnnnnnnnnnnnnnnnnnnnnnnnnnnnnnnncgatctagagattcgtctgccgtctcgatagttaaacgtttttagtttgactagtgttgagctccagaaagggtctcgcggacggtctagctctaaggccagacagtatagtcagttagagttccgagtttctcacgtgatttgttagctaaaattgcgggattagctcgggaaacaacttgtagtggatccaaacctctcctttatatatatgaagggctacagccgattcaacccctacaatcgatcaaatcaattctatttctcgttttacttatgcattaggagtagttctagtttagctctaggttaacctttccctacccccaaattcttcgcttctcttcagctctacgtcgattagagttgtctagggtggcctgccgaccctagacaaagcctaggatctctattccccgacaggaccctcccgggagcgagattcaggcgccgccaccgaactccgccgcccctgcgcacgcgtggactgttcagcctctaggcgcgcacctttactttccgtcccattaggcaaaccacccaacttttgatggtgaagattatgctaggtggagtgatttaatgcgattcatctaacctcactccacaaaagtatatgggatgttgttgagtttggtgcacaggtaccatccataggggataaagactatgatgaggatgagtggcccaaatcgagcacttcaactcacaagcaacaacatactcctcgcctctctaagcagagaggagtataacaaagtacaagggttgaaaagcgctaaggagatntgggatgtgctcaaaaccgcgcacgaaggagatgagctcaccaagatcaccaagcgggaaacgatcgagggggagctcggtcggttccggcttcgcaaaggggaggagccacaacacatgtacaaccggctcaagactttggtgaaccaagtgcgcaacctcgggagcaagaagtgggatgaccacgaagtggtaaatgttattttaagatctctcatttttcttaatcccactcaagttcaattgattcgtggtaatcctagatatactaaaatgacccccgaggaagttatcgggcattttgtaagttttgagtgcatgatagaaggctcgaggaaaatcaacgagcttggcgacccatccgaagcccaacccgttgcattcaaggcaacggaggagaagaaggaggagtctacaccaagtagacaaccaatagacgcctccaagctcgacaatgaggaaatggcgctcgtcatcaagagcttccgccaaatcctcaagcaaaggagggggaaggactacaagtcccgctccaagaaggtttgctacaagtgtggtaagcccggtcattttattgctaaatgtcctatatctagtgacagtgaccgaggcgacgacaagaaggggagaagaaaggagaagaaaaggtactacaagaagaagggcggcgatgcccatgtttgtcgggaatgggattccgacgaaagctcaagcgactcctccgacgacgaggacgccgccaacatcgccgtcaccaagggactcctcttccccaacgtcggccacaagtgcctcatggcaaaggacggcaaaaagaagaaggttaaatccaactcctccactaaatatgaatcttctagtgatgataatgctagtgatgaggaggataatttgcgttccctttttgccaaccttaacatagctcaaaaagaaaaattaaatgaattagttagtgctattcatgaaaaggatgaccttttggatgcccaagaggattgtctaattaaagaaaacaagaaacatgttaaggttaaaaatgcttatgctctagaggtagaaaaatgtcaaaaactatctagtgagctaagcacttgtcgtgagatgattgacaaccttagaaatgaaaatgctattttaaatgctaaggttgattcacatgtttgtaatgtttcaattcccaatcttagagatgataatgttgacttgcttgctaagattgatgaattgaatgtatctcttgctagccttagattagagaatgaagatttaattgctaaggctaaagattttgatgtttgcaaagttacaatttccgatcttagagataaaaatgatattcttcatgctaagattgttgagcttaattcttgcaaaccctctacatctattgttgagcatgtatctatttgtactagatgtagagatgttgatattcatgctattcatgatcatatggctttaattaaacaacaaaatgatcatatagcaaaactagatgctaaaattgccgagcacaacttagaaaatgagaaatttaaatttgctcgtagcatgctttataatgggagacgccctggcattaaggatggcattggcttccaaaggggagacaatgtcaaaattagtgcccctcctaaaagattgtcaaattttgttaagggcaaggctcccatgcctcaggataacgagggttacattttataccctgccggttatcccgaggacaaaattaggaaaattcattctaggaagtctcactctggccctaatcatgcttttatgtataagggtgagacatctagctctaggcaaccaacccgcgccaagttgcctagaaagaaaactcctaatgcatcaaatgatcatgccatttcatttaaaacttttgatgcttcttatgtgcttactaacaaatccggcaaaatagttgccaagtttgttgggggcaaacacaagggttccaagacttgtgtttgggtacccaaagttcttgtgtctaatgccaaaggacccaaaaccgtttgggtacctaaagtcaagaactaaaattgttttgtaggtttatgcatccgggggctcaggttggatactcgacagcgggtgcacaaaccacatgaccggggagaaaaggatgttctcctcatatgagaaaaaccaagatccccaacaagctatcacattcggggatggaaatcaaggtttggtcaaaggacttggtaaaattgctatatctcctgaccattctatttccaatgtttttcttgtagattctttagattacaatttgctttccgtatcccaattatgtcaaatgggctacaactgtctattcactgatgtaggtgtcactgtctttagaagaagtgatgattcaatagcatttaagggagtgttagagggtcagctatacttggtagattttaatagagctgaactcgacacttgtttaattgctaagactaacatgggttggctctggcaccgccgactagctcatgttgggatgaagaatcttcataagcttctaaagggagagcacattttaggattaacaaatgttcattttgagaaagacaggatttgtagcgcatgccaggcggggaagcaagttggagtccatcatccacacaagaacatcatgacgaccgacaggccgcttgagctactccacatggatctattcggcccgattgcttacataagcatcggcgggagtaagtattgtcttgttattgtggataattattctcgcttcacttgggtattctttttacaggaaaaatctcaaacccaagaaaccttaaagggattcttgagacgggctcaaaatgagttcggcttaaggatcaagaaaataagaagcgacaacgggacggagttcaagaactctcaaattgaaggcttccttgaggaggagggcatcaagcatgagttctcttctccctacacgccacaacaaaatggtgtagtggagaggaagaatcgaactcttttggacatggcaagaaccatgcttgatgagtacaagacaccggaccggttttgggccgaagcagtcaacaccgcctgctacgccatcaaccggttatatcttcaccgaatcctcaagaagacatcatatgaactcctaaccggtaaaaagcccaacatttcatactttagagtttttggtagcaaatgctttattcttgttaaaagaggtcgaaaatctaaatttgctcctaaaactgtagaaggctttttacttggttatgactcaaacgcaagggcatatagggtctttaacaagtccactggactagttgaagtctcatgtgacgttgtgtttgatgaaactaacggctctcaagtagagcaagttgatcttgatgagataggtgaagaacaggctccatgcatagcgctaaggaacatgtccattggggatgtgtgtcctagggaatccgaagagcctccaaatgcacaagatcaaccgtcctcctccatgcaagcatctccaccaactcaaaatgaggatgaagctcaagttgatgaaggggaaaatcaaggagatgagccacctcaagatgatggcaatgatcaagggggagatgcaattgatcaagaaaaggaggatgaagaaccaagaccgccacacccaagagtccaccaagcaatccaacgagatcaccccgtcgacactatcctcggagacattcataagggggtaactactagatctcgggttgctcatttttgtgaacattactcttttgtttcctctattgagccacacagggtagaggaagctctccaagattcggattgggtggtggcaatgcaagaggagctcaacaatttcacgagaaatgaggtatggcatttagttccacgtcctaaccaaaatgttgtaggaaccaaatgggtcttccgcaacaagcaagatgagcatggtgtggtgacaaggaacaaagctcgactcgtggccaaaggatattcacaagtcgaaggtttggatttcggtgaaacctatgcacccgtagctaggcttgagtcaattcgcatattattggcctatgctacctaccatggctttaagctctatcaaatggacgtgaaaagtgccttcctcaatggaccgatcaaggaagaggtctatgttgagcaacctcccggctttgaagacagtgagtatcctaatcatgtctataggctctctaaggcgctttatgggctcaagcaagccccaagagcatggtatgaatgccttagaaatttccttattgctaatggcttcaaagtcggcaaggccgatcctacactctttactaaaactcttgaaaatgacttgtttgtatgccaaatttatgttgatgatattatatttgggtctactaacgagtctacatgtgaagagtttagtaggatcatgacacagaaattcgagatgtcgatgatgggggagttgaagtattttctaggattccaagtcaagcaactccaagagggcaccttcattagccaaacgaagtacactcaagacattcttgctaagtttgggatgaaggatgccaaacccatcaagacacccatgggaactaatgggcatctcgacctcgacacgggaggtaagtccgtggatcaaaaggtataccggtcgatgattggttcattgctttatttatgtgcatctcgaccggacattatgctttccgtttgcatgtgtgcaagattccaatccgaccctaaggaatcccaccttacggccgtaaaacgaatcttgagatatttggcttatacccctaagtttgggctttggtaccctcggggatccacatttgatttacttggttattcggatgccgattgggcggggtgcaaaatcaataggaagagcacatcggggacttgccagttcttgggaagatccttggtgtcttgggcttcaaagaagcaaaattcggtcgctctttccaccgccgaagccgagtacattgccgcaggacattgttgcgcgcaattgctttggatgaggcaaaccctgcgggactacggttacaaattaaccaaagtccctttgctatgtgataatgagagtgcaattaaaatggccgacaatcccgtcgagcatagccgcactaagcacatagccattcggtatcattttcttagggatcaccaacaaaagggggatatcgagatttcttacattaatactaaagatcaattagccgatatctttaccaagccacttgatgaacaatcttttaccagacttaggcatgagctcaatattcttgattctagaaatttcttttgctaagcttgcacacatagctcatttgaatacctttgatcatatctcttttatatgctatgactaatgtgttttcaagtttatttcaaaccaagtcataggtatattgaaagggaattggagtcttcggcgaagacaaaggcttccactccgtaactcatacatcgggcttttcgccggtctccatctccttcttggcgtgatctcccgccaccactccgagcaactctctcttctttgggggagaaatgagcatcaaggaaaaggacttcatccttgggggagagagtaaaagctcaaacgcaaaaggacttcgtctttggtataatcttaactcacttatttatgaccaaaggggaagattgcacttccagggctctaatgattccgtttttggcgattcatgccaaaaaggtgggaaatgagcccaaagcaaaaggaccgcacctccaccaaatcaaagacgaatctactagctcgtnnnnnnnnnnnnnnnnnnnnnnnnnnnnnnnnnnnnnnnnnnnnnnnnnnnnnnnnnnnnnnnnnnnnnnnnnnnnnnnnnnnnnnnnnnnnnnnnnnnntctgatgatatcaagcttgattcgtttcctcgtcgtcggaggagtcgcttgagctttcgtcggaatcccattcccgacaaacatgggcatcgccgcccttcttcttgtagtaccttttcttctcctttcttctccccttcttgtcgtcgcctcggtcactgtcactagatataggacatttagcaataaaatgaccgggcttaccacacttgtagcaaaccttcttggagcgggacttgtagtccttccccctcctttgcttgaggatttggcggaagctcttgatgacgagcgccatttcctcattgtcgagcttggaggcgtctattggttgtctacttggtgtagactcctccttcttctcctccgttgccttgaatgcaacgggttgggcttcggatgggtcgccaagctcgttgattttcctcgagccttctatcatgcactcaaaacttacaaaatgcccgataacttcctcgggggtcattttagtatatctaggattaccacgaatcaattgaacttgagtgggattaagaaaaatgagagatcttaaaataacatttaccacttcgtggtcatcccacttcttgctcccgaggttgcgcacttggttcaccaaggtcttgagccggttgtacatgtgttgtggctcctcccctttgcgaagccggaaccgaccgagctccccctcgatcgtttcccgcttggtgatcttggtgagctcatctccttcgtgcgcggttttgagcacatcccaaatctccttagcgctcttcaacccttgtactttgttatactcctctctacttagagaggcgaggagtattgtcgttgcttgtgagttgaagtgctcgatttgggccacctcatcctcatcatagttctcatcccctacggacggtacctgtgcaccaaactcaacaacatcccatatacttttgtggagcgagattagatgaaatcgcattaaattgctccacctagcgtaatcttcaccatcaaaagttggtggtttgcctaatgggacggaaagtaaaggagtatgtttggagatgcgagggtagcgtaggggaatcttactatacttcttgcgctcttggcgcttagaagtgacggagggcgcatcggagtcggaggtcgatgttgatgaagtgtcggtctcatagtagaccaccttcctcatcctcttgtgcttgtcgcctttccgatgcggcttgtgggaagaagatttttccttcttctctttgtgatgagaggaagatttcttctccttccctttgttggaggagctcttcttcttctccctccttttggtgcgggactcttccgatgaagtgctcccttggcttgtagtgggcttttcgccggtctccatctccttcttggcgtgatctcccgacatcacttcgagcggttaggctctaatgaagcaccgggttctgataccaattgatagtcgcctagagggggggtgaatagggcgaaactgaaatttacaaatataaacacaactacaagccgggttagcgttagaaatataaatgagtccgagagagagggcgcaaaacaaatcccaagcgaataagcaagagagacacggagatttgttttaccgaggttcggttcttgcaaacctactccccgttgaggaggccacaaaggccgggtctctttcaacccttccctctctcaaacggtccctcggaccgagtgagcttctcttctctaatcaaagccgggaacaaaacttccccgcaagggccaccacacaattggtgcctcttgccttgattacaatggagtgtgatctcaagaacaagtgagaaagaaaagaagcaatccaagcgcaagagctcaaatgaacacggcaaatcactctcactagtcactagggctttgtgtggaattgtagaggatttgatctctttagtgtgtctagaattgaatgctagagctcttgtagtagttgagaagtggaaaacttggatgcaatgaatggtggggtggttggggtatttatagccccaaccaccaaacttgaccgttggctggaggcgtctgctcgatggcgcaccggacagtccggtgcacaccggacagtccggtgcccctgccacgtcatcactgccgttggattctagccgttggagcttctgacttgtgggccctcctgagtgtccggtgcacaccggacatgtactgtttgatgtccggtgcaccggcatgggcgtgcctgacgtctgcgcgcgctgcgcgcgcaataaatgcaccgcagggagccgttggcgccgcagagagacgttgctccgctggcacaccggacagtccggtgcacaccggacagtccggtgaattttagcggagcggctgccgcgcgaacccgaggctggcgagttcctgaggccgacttcccttggcgcaccggacactgtccggtgtacaccggacagtccggtgaattatagccgagtcgccttggaatttcccgaaggtggcgagttggagtctgagtcccctggtgcaccggacaggtactgttcactgtccggtggcacaccggacagtccggtgcgccagaccaggggtgccttcggttgcccctttgctcctttgttgaatccaaaacttggtctttttattggctaagtgtgaaccttttacacctgtatatactatacacttgggcaaacaagttagtccaaagatttgtgttgggcaattcaaccaccaaaattatataggaactaggtgtaagcctaattccctttcaatctccccctttttggtgattgatgccaacacaaaccaaagcaaatatagaagtgcataattgaactagtttgcataatgtaagtgtaaaggttgcttggaattgagccaataaaactacttacaagatatgcatggaatatttctttcttatataacattttggaccacgtttgcaccacatgttttgtttttgcaaattctttttgtaaatccatttcaaagatcttttgctttgtcaaaggtaaatgaataagagtttgcaaagcattttcaagattgaacgatactctgttcgttcatgnnnnnnnnnnnnnnnnnnnnnnnnnnnnnnnnnnnnnnnnnnnnnnnnnnnnnnnnnnnnnnnnnnnnnnnnnnnnnnnnnnnnnnnnnnnnnnnnnnnnccttatgaattatccggtgcacaccgggacatgtactgttttgatgtccggtgcaccggcatggggcgtgcctgacgtctgcgcgcgatgcgcgcgcaataaatgcaccgcagggagccgttggcgccgcagagagacgttgctccgctggcacaccggacagtccggtgcacaccggacagtccggtgaattttagcggagcggctgccgcgcgaacccgaggctggcgagttcctgaggccgacttcccttggcgcaccggacactgtccggtgtacaccggacagtccggtgaattatagccgagtcgccttggaatttcccgaaggtggcgagttggagtctgagtcccctggtgcaccggacaggtactgttcactgtccggtggcacaccggacagtccggtgcgccagaccaggggtgccttcggttgcccctttgctcctttgttgaatccaaaacttggtctttttattggctaagtgtgaaccttttacacctgtatatactatacacttgggcaaacaagttagtccaaagatttgtgttgggcaattcaaccaccaaaattatataggaactaggtgtaagcctaattccctttcagagccattgcagtgcaggaacatcaatatagggataaaagaactaaatcgaaacagttcacaacgatctatctgcctagcacgagccttggatcctatgtggacatggtaataagtgttacctctaggctccggctatggttgttgcacttcctcgggcagcctggagtcaacaccgtgcaccgtgctcccccaactctgtcgccgtcgtcgctccctcgggccccacaaacacgctcgtcgccgccatacgcgccatcaatgccaacacaccctctccgacaaggagaaagcgtgccgccgcgaggccctcctcatcggagtcccctacccatcgaggcaaattaaggtcagtagagcatacaagtgtgacagatagatgactgaggaatcccgggagggagcgatgagccgatgaggacgcccacgttgtgcaagggtgggaggtgtagcccttaacatagggtgatacgaaggttctttgaaggctaagcaactcaaacttgtggctctcgaaaaggtactttatgtagggcactgctcgcttatttatatggaagataaaccgcctttgtacaaaattacaactgcgccccttaaggctttacactcattatttacaaatggtgtaagtatatcactatcttttcctttcttcacactcattgcggcctctccgttgctctttatccgaggcctttccccaccgaagctagctaccttgacttgcatcttcgttgcttgtgcgtatagatgaagctttccttcacgttacttcgaccgaaagctggctacatttagtctgtatcacacaccttaaacagtcgaaggcctgcttcgtctggtttcattatacacatgaaacacacttaattatgtgatacaaatattttggggacgttcggcaatgtaggcccccaacagatataaactttaacattcaataattaagcatggaagttgcatatattagaatataaatggttcgaacatgttataaaatagataaagattgcagtactacttatcttgcctacgctttctcaacaccataaaattctcaattatgtcttctccatcaacttcaaagaaaatatccctctcaatatatgtaacaaggcgtgttttaaaagtgtttcaaaccctttattccaattattccaaccatctgaagtaaatgcagaagtctctttgcccttatttgctttgtttttgaataagtagcacaaaaagcaaaatacagtgtctctcttgacacaatattcaatacaacagaaattttgaaaccacacaaaattaaaacggcgatcactatctccaattttcctatttggggaattcatgtgcatatggttgaaatgaacctctaagaatatatgctcttcgaattgcatcatgatcattagcatggtaacttgtgaaagggaattaggcttacacctagttcctatataattttggtggttgaattgcccaacacaaatctttggactaactagtttgctctaagtgtataagttatacaggtgtcaaaggttcacaacaagccaatcaaaagaccaattttggattcaacataggagcaaagggccaaccgaaggcacctctggtctggcgnnnnnnnnnnnnnnnnnnnnnnnnnnnnnnnnnnnnnnnnnnnnnnnnnnnnnnnnnnnnnnnnnnnnnnnnnnnnnnnnnnnnnnnnnnnnnnnnnnnncaacttaaagttgttcttgaccagtctcgacaagatagtgtaaaatagtccgcttggtaaaaaaattgctatgaaatgtatggccacccagccctccatattcaaatgcctaagtggagtttggacatcccattttttttcttcatattaacatttggcttgtcgtggcaaaagatttgcaaaagccaacaaactgacttgggttattgaaaaagaactcttttatacttaaatgtttgttggcccactcaattgtcccaatggtgcaccaagcgttgcttttggcaaaggagaattatggggtgaaaaagtgaattggcatgtttttgtcaagtcaaattcttactctttttttgtaactgtatgttttggtagattcactaaaaatggtgatcagctatgtgcacctccactagataaattcttacggtttgtgtatttcactccttcaaagatagtctattggataaagttaaaagtagtagtcatttccttatacttgcacatgttagggtcaatttcatactcgatatgttccttcaggtactttttatttgcttgcacctgaaaatgactaaacatcactttctgcttgacgtttagtattatattaattagcattgctgtgcatttctcattgggttattgaaatccacatttaatttattgtgtgcccttaatggtagagaaatagatcttgtgtgcacaactttttgcagtaaagagttccattgtagtctgtaggaattaaaatttcctttttctatatataaaaacacgatttcatgcaatttttctctctctctctatggtacaagatacgtgacgatgtggcatttgcaaaacacatggtgagaaaggatatggttagttggtctgtcaactctacttgatgaatgacaacaattctttcatttgttgaaattctcagcttgttcagttcatagttctgatttcatggttcatatatggatacacaccaatacaggtttgttgtgacaatatgataaagttgcacatgttttgttgtctcctttccctatgcttatctcaactgtaataaacaagttgtatttgaaaaatcactatggtacaatacataatagatgtgagaactgatctcttttggttttctttctttctaagagtaaattgtatacatcttatgccaaacttccaagagcttaatagatgtaccactcgaggttttctaattcattttagatttcaactgatcgtactacttgtcactcaagtcatggacagtttgcatgcggatttgactgaatcaatgaaaaaaggtttagggtttggcattgttacttatcttactactattccatatcttttttccttcgtgtttctatatctcttgtatgctctagatatattatgcactaacattttattaaatgataatctatgtcccgttgcaacgcacgggtaactaactagtgttcgttaatatgcgaatttgcatcctttagttcgttgatagacgaacttggatttctgcaatccttggattgaatgtacttcgacccaatatgcttgccgtggcccatgaaagttgttttaaaaattttgggtttagttgttagttacattttatggattttttttcagcaatccgtgataagatgttttggggaaggatttttaaaaagattgttagttacattttatggattttttcagcagtccctgataagatgttttggggaaggattttttagtgccctcttgaagttgctctaacttacgtataaagacatgacttgggaatttttccaataaccgtgacttctaccccctctgtcccaaaaaataagacatagatttttttttgaaaaaagtctttaaagtgaaactttgaccatcaatttgttttaaaatatgatatcacaaatgcaaattaagcatcatattaaactatttttgaatttaaattcaattatataacatgcgtacactaaaatatatatgttttcagggatggagggagtatacaacactcttgtgttgcttaaatgttatgcaccttgcatcctcataacatcatgtcattttctgcacctcatccatgcctacgtcaaatccacatcaccaatccaaagaagcaatagcagcatcttctgctgcaatgtcttccctccgcgcccctattgtctagaaaacaaaccccctatcatcaaaaaaccaaactacttgcagtctttcaatccaatatgtaacatcaccttcaaataaacaaaccacctagcatcttggttttttattgtctcaccctccaagacttcaaacatttaacacaccatgtgagctagaattacaccctatacagaacgggaaactgtgaagctgtgggatatgaaggttgcttttgatgatgacaacgtgcttctctaaccagtgtggtatatctctacaccataccgtattttagtttttttgaccaaaaaccccttctgtgggaaatcctaatttannnnnnnnnnnnnnnnnnnnnnnnnnnnnnnnnnnnnnnnnnnnnnnnnnnnnnnnnnnnnnnnnnnnnnnnnnnnnnnnnnnnnnnnnnnnnnnnnnnngaattttaacatgatgcgaatcatctatgtagatgggacccaaggtaaggtcaaaggattggaaaagtaaccatcacatcacaagcattctatctctaatgtgtttttagttaaatcgctcgggtataatttgttatttagtgagtcaattatgtaacatgggttataattgtttattcacaaatgtagatgtatatgtttttagaagaagtgatggttcactagcttttaagggtgtactagatggcaagctctatttagttgatttttcgaagagaatgccgatctagatgcatgcttaatagctaagactaatatgggctggctttggcatcgccgtctagcacatgttgggatgaagaaccttcataagcttctaaagggagatcatgtgttaggactaaccgatgtatgttttgagaaagacagaccttgtgtagcatgtcaggcagggaaataggtgggaagcactcatcacaacaagaatgtgatgacaacatcaagaccactggagcttcttcacatagatctcttcggacccgttgcctacctcagcatcgggggaagtaagtatggtcttgtaattgttgatgattttttcccgcttcacttgggtattctttttttgcatgacaaatcagaaacccaagggactctaaagcactacttaaggagagcttaaaatgagtttgggctaaaggtgaagaagataagaagcgacaatgggtccgagttcaagaatctacaagttgaagagttccttgaggaggaaggcatcaagcacgagttctccgctccctacacaccacaacaaaatggtgttgtagagagaaagaacaggacactaatcgacatggcaagaacgatgcttggagagtacaagacgcctgagcggttttggtcggaagctgtgaacacagcttgccacgccataaaccggctctacctacaccgtctccttaagaagacttcttacgaactcctaactggtagcaaaccaaatgtttcttactttcgtgtatttaggagcaaatgttacattctgttgaagaaaggtagacattcaaaattttgctcccaagacagtagaaggtttcttactgatatgactcaaatacaaaggcgtatagggtcttcaacaaatcatcgaattagttgaagtctctagcaacattgtatttgatgagactaatggctctccaagagagcaagttgatcttgatgatatagatgaagatgaagttccgatggccgcaatgcgcacgatggcgataggagatgtgcgaccacaggaactacagaaagaagatcagccttcttcctcgacactagtgcatcccccaactcaagatgatggacaggtacctcaagaagaggagcgtgatcaagggggagcacaggaagaatatgttattgaggaagaagcaccatgggtccctccaactcaagtccgagcgacgatccaaagacatcaccccgccgatcagattctgggtgacatcagcaagggagtaactactcgctcacgattagctaatttttgtgagcattactcgtttgtctcttctattgagcctttcagggtagaagaggccttgcaggatcggaactaggtgttggccatgcaggaagagctcaacaacttcaaaaggaatgaagtctggagcctggggccgcatccaaagcaaaatgttgtgggaacgaagtgggtgttccgcaacaagcaagacgagcactgagtggtgacaagaaacaaggcttgacttgtggcaaaaggttatgcccaagttgcaggtttagattttgaggagacttttgctcctgtagctaggatagagtcaattcggatattattagcctatgctgctcaccattcctttaagttgttctaaatggacgtgaagagcgctttcctcaatgggccaatcaaggaggaggtatacgtggaacaaccccctggctttgaggatgacaagtatcccgaccatgtatataagctctctaaggcgctctatggacttaagcaagccccaagagcatggtatgaatgccttagagatttcttagttgctaacgctttcaaggttgggaaagctgatcccactcttttaacaaagacttgtgatggtgaccttttcacccccccccacacaggtcaagaacaggtaccgcaggatgaggcgtgtggaggatgctgcgatgagttcgtgagagatataggccgtcgtctcccagtcaactttgggttgctggaccgttgtctccttttaatgtaataattttcaaggatagaattctcattatacagtaaagatgcgacattcgatctttcaccatgttcatcagaagggtgagaattggtcccagcacacgtggtgattatgatggcgaccgggtctcaataaagaaggcccgggtgtgacagaaaggcatgacgaatctctagatgnnnnnnnnnnnnnnnnnnnnnnnnnnnnnnnnnnnnnnnnnnnnnnnnnnnnnnnnnnnnnnnnnnnnnnnnnnnnnnnnnnnnnnnnnnnnnnnnnnnnggtccgggcaaaggcgaccaggaggtcgacacatgtatgcggtctacggtctacggtctgcgtctctgtgtgtgtgtcactcaagggaaaaacaagggtttcatttgatgtgcacctcatcagtgtacctggcctgcaaatgtatcagttcatgtccgtgcacatatatgcattcaacgcagctgtttcagtatcacgcagttcgactagaatatatgtgaatatggtcttaacatatgcacgcacttttctgagtttttagttcggcaactacttcttttaatacaattctatccagcatactgcatatatacttctctgcaccgtgtttttttagatataacataacgtgatgtttagataatgggcaaacatatgtatgacattttttttgaacggtaatataaactggtattagcatatgcatgcacctttcccgatacattgcttattgcaatcatctttttttttaaataatcaatcacgaatattcgttctagtactactctcttctcgcattatatgtggcagtaccaagtattatcacattgttccaaaaaaaggtactattattgcaacaatgtaatgtaagatgtatctgcaatttctactctgtacaaaaacaaagagatctatccttaaaccacatcacctacttacatatacaacagtttcgtattataggggagttgctctaaaaccatacaatcagaagggggaggggggcatttaagcttttaaaattaaaaagagataaattgagttgctatgcccgattttactttttctggtaccaatcttgttagctaacctgcaaacggttcaataaagtgattccgatttactaaaaaatatttcagaatataaatccaaaactgttctataaaaatctagaactcaaaaaacacaccctactacgctagctatgcatgaatccataattggtcatcttggacaatggcacattcaccataatataacttttggctatagttttgttatgacgtatacaaaaaaaatactagctccgtttataaatatatgacactgttgacttttttaaaaaaaactttgaccactcgtcttatttaaaatatttattcaaaaatataaaattttaagtcaaatataaactaccttaagtgataaaacaaatcacaaaaaaataattgataactcattattttttgaataataaaacgagtagttaaagttttttttaaaaaaagtcaacggtgtcatatatttatgaatgaagaaagtaataaatatatgttttatcaaataatattttgggaataatcttaattatttgttttattgtttacgaactataaatgttttaaaagttctcgatagttaaagttgtaaaagtttaaccccaaacttgtccaaaatgaaagaattgtgaaacgaaaggagtacttagtgaaacatgaaatgtgacaagtagcctataagtacactagatttaacactgaagtaggctatagtcaatttgtattgtgttcttttaggaatcaatagctttgagtgattttaattgactctccacttttactactatgcaatatactgatccatattataataagtactttggttgcattttattgacttctggtaccatatgctaggaaaataatggttcaaatctataaactgtagactatgtcaatgtcctacatgaaaaacaaaaccatacttggtttgtgctcaaagaattcaattgccatatcaatgctgacactttccttttaccaatactttttaattgaaattgaagctgtattttataaaagtttaaaataacctctatatatattaatccatacatagtccaagctccaaatcatataacctcacttgccttctctcgtcttatttaattaacaaccaacaatctagaggatccaaaaaaacttcaatttggctggatcaaggctgacctacaataccaagccacgccttaaaccgataggagcttataatttcgacataaaatttattaattgaaggacaagtgaggtgaccagagatggtgaatggtagccaatcaaattttgctgctaagaactagaaaaggagctcttaacttcaattgagatgaagtaatcacacaaaccaaaaacatatcagccaaccagtgatctcatgatttcaaaatattcctagaactcacacgggaccaataaaacaaattgctcacaaattggacaccgaaaagtccgaatcagtaaaaaatgtgtcgctattcggtgctgttttcagtggctcgaaattcagttttcgaatgcgaaatgaaccaaatggactccgattaagctgaaattttacagacaccttgacaaatgagcttccaaggtctacacaaatttagaactcaaacggatttgtaaatcaatcgcagatcagaaaacacgaacagacttgggttttgcctttttgatcaaaacaagttcagatcaatccacaacaaaaaaccgtgcaaaccagaggttcttagcggtctaaggactgaattaaacccagagagaaaccccaaaacaaatctctaattcaagaactcgaaggtttttccacaatccaaagagaaaaggaaagagaagagagccagaacaaaatcgaatcaaaactgcagcaaagacaaaactgagcacatgattcaacaaatcatgtagatggatatggtcaccctttttttgaatgatgaggtgaagattgcaaagacacggaagtggagttcaaatcagctgcagatctcaggctaaattactataaaaactag

SEQ ID NO: 19 - DNA, 10591 bp, Zea mays
tttcatttgccgtcgcttcgggtctgtccctcctcctccccaattggtggggtcgctttcgtactactactactgctagttgtgtcttgtgtgcccatgagcctagcgttttggggatgttttcttgcccctgatggtggatccactggccgccggttttctccagctggagagccattcgtgggcgtaggacgagagagaggatcggcggcggcggcgtgtgggagatggcgcgcgagaggcgggagatacggcggatagagagcgcggcggcgcggcaggtgaccttctccaagcgccggcgcgggctgttcaagaaggcggaggagctcgccgtgctgtgcgacgccgacgtcgcgctcgtcgtgttctccgccaccggcaggctctcgcagttcgcgagctccaggcacgcactctcgatcgatcactccgctagctagcctagctacatacctaccgtgtttccctccgcgacacgcccatccgacgtcacatcacatctgccgccgttcttcgaaccctttttttcctttatcgccacgcatggcgtgttttctcgtttgaaattgggatctggatcttcttctgacacggtggcttggtgtttcggatccttgcactagggtttcgtgcttggccatactacaaattccctctctctctctctctctctgtgtgtgtgtgtgtgtgtgtcttctttcttagtagggtttggctttcatttggaagacgatatgctgagcgaattcgttttctgtttgaatacggtagaacttgttgtatgcagtggaaatcgagcttcccttgaacatctaccgcctttgttgtgcgtgcctattcccgccagctccccggccagcttctcagagaaatggggaattttctacagtatttccctggttttctacagtgtttcccgtcagctcgcggattactctttttacggtgggccgaattgctgtagctcgctgccgagagcactccggccggtgtacgcccgctaatttctgcccgtcgcttgtcctgcggtggaaacgctggtgctgctgatcgatggacccgatcaaacactgtggatcagcgcgtggcggtcgttgataagctgagagctcatgtcgaacggccgtacctgtgattttatgtgccggttttggttcatgcatgcacggacttgatcgttctccctccccggctgctgaagcctttcgtgattcgtgctgctgggataaactattctggtcaagtaccgctgcttgtggtgctggcgctgcatctggttttcgtgattcgtacgtgcatgattgatgacgggcgtttcaccatttttctttgtggagcacacatggcttgttccgtgccaatcgaagtacataagcagaacatttatatgcaatttagtctgtgtttagttcagtttttttttataaatctgtttctgttttaaaaaagcagaagctgaatcgaaggggtttatcttttctgccactactatggaaaatcagtttttcttaatacaaattttaaagaacttatactgtgcttttcgctgcttatccaagttcgatatattaataaagagataaaacaagcaattaaaacgagattcaaattaattaagtgttataataaataaataattaattattaataaaaatattagaatgggattgtaaaattgaattattacttgaatatattaatgaagagacacaataaataggaaataaaatgggattaaaaataattaagtgttagaataagtaaaataaatatatatattattaaaaaatatagcaagtggagtctagttttattagtaaaaatattaggaacacaaatgtgaattttttaaattagatatattgattaagagatatagttaaacaaagtgcatagacaatccatagtaatttgaaccaaacgacttataccaatttttttatagtagatagctcatagtaacttttttacagctcactagaatgtttctctattcttcctagagcatatgcctataatcgtgttagggtgctacttattttattgataaattcaatatgatagttagaggttgtttcattattattttttgaatattatacatgcacaaacataactcatcctcaaaagtgaattcttttggttattcattatatttgatatgtataacggccatttcattaactcacaattatttagaatcttttgctttcctgatttaattagtgttgcttctacgaacccacatttaacacggaggctacactacccgacacaaccgctttgccgagtgataaatactcgagaaacttttttgccgagtgtgactttcgtcaaaaaagtctcagcgaattgtacatcggcagtgacttctttgctgagtattttttttcgggcactcggcaaagactctcggcaaaaaaaagaaaaaaacaaaaatatactttgccgagtgtcagagaaagacactcggcgaataattaatttgtcgagtgtcttctagaggacactcgataaaaaagttattttgccgagtgtcaactccggacactcggcatagctaacgatcatcaactatagatggttgctgacagccctttgtcgtgcgtctcgtttcgacgagagcttgacactcggcaaagactgctttgccgagcgtcggtgtctgccgagtgttttgcccttgtcaaaggaggtatgtgtcgagtgtcattattcgtcgagagtggcactcgacaaatcttattttgttggctgcccgataaattacactcagcaaagtgcctgacactcggcaaagatccctgtttctggtagtgctagtagacaagtgaataaaatgttagagcaacttaagagactctttatatcattctcagtatatataaattgagattttgctgaaaaagtactctctagcagcgtttttaactgaatctccaaatatagacatcctctattctagatttttcgctagctaaagatggagaatacatatggctcactagagttcacacaagatatagaaaacttattgttgggtagaaagatgtataaaacgaatatactcaaattgctttctaaataataacttagagaaaaaaattgttgaaaaactcttcgagatgcccttagttaacaggataagcatatgtttgatgtttatctgtatgcttcaaagcatgcaggatgtgattttgggctttcaaacctaacgtctgatcaaaatgccttgatttttgctagtgtggatggcatataataaggtatgttggtgagtacactgtgcataaatatctatgatgcggttcagtttcatggtcccgttggagcttgtggctttagaaaatagaaacactgcaagaactgcacgttcaatggaggggcaccatgagtttaggttgttctatgggagttcatgagtctagggacggagccagaaaacattttagtagtgaattaaaccgctacattgatataatcttactaaatcactcacaataatagacataaaatatataataataagattatactatgttttaggagagactttagtggactccatagtttagtgactaattttctggatcgatggaattgaggaacatgaacgtggtacgcggcataatactaaaactacaaaaacgaaattgtttccacgttccagaaatggaacgaacgttcccgaaacgaggaacgcgaagttttcagtttccggtttcttagctgcatagacatgggagcggtgggaggctggagtcccaccgctggatccgtgtctgcatgggtctaaccttgcaagtaacaggcgcgaaggggctcagccattcattgggccgctataacataatgcttgttcgaggttggtcattttttttcagtttctgttgcacatttgccttgctaacttacctttgggtccctgtatgtatgggtgatctcccccttaggaaaatcttatactcgattcatttttcttttaatacaaagacttgtatatctcttgtgtgtttgagtgaaaagctatatgttatgtgatttaatctcattttctagctgttctaccttatctctttctttacattgataattaatacatgcatgtcacttgatccatacatttccatatccaacactgtatgtgacttatagtaatctaaaagactagacagatgccactactatgacaccacaaatgcctctgcatagtactaacgttagatctggttgcaaacatggaatgtttttctcaattcctactggaacctaattttttcctattaaatttctgcatttcactctgacaactgaagatgctgacatttctatattgctgtgttttcaaatttcatatcctcattgccattgtaagcttccattatatgttttcattatttaccgtttgcttttgcttttgtcaacagtgtgaatgacatcgttgacaagtacagtacacattctaagaatctggggaaatcacatcagcagccttctattgatttgaatgtatgttatgttagcaatatttttccttttttctttccttgaacttttcttactaataggcaatagtgtaaagcacttttacaggaaagacagatgttaaaagttagaaatgtgtgggaagtctagtcggtccacagacagcaattacatttttgttgtgcaaacaatttaatatgaactactttttcgtagttccttgtgattaagtcatgcttctgtggacagttcttagctgatgcaaactttcatagctcttagtataaactattatagatcagagtacaagaacattggaaggcatactcaaataaggggatatacattgaataaagattgcaaagtagtcttttctgattgattaattattcttgagcaatattattagtgtctacacttacttttatataactatatgtagaaaaatcgatgtttaccttctgaacagaaggaattgactggtaaatttatcaagctatcctttttttccttcaatgtgatatgtcaagatacaccttggtgaaatgaataattgtttatccatagtaccacatagtattccttacaatcttagtgttaatcagtcttggacttcttatcctccaagtgtagtttgcatgcacactactgtttggagaattacagtatgtgtatacgtatatttaatgtttcatttaacttatatactaatcctattttcccttataatttttcaggtagagcagagcaaatacagcggcttgaacgagcaacttgctgaagaaactaatggacttaggttatgttttgtttcatacacaatgattatgtgattcaaagaacatttgtttcatacacaaatgactttactgttcgataatgtagacagatgagaggtgaagaccttgagggattgagtgtagaggaattgcaccgaatggaaaggaaacttgaagcaggactgcatagagtgattagtacaaaggtagggtgactgctcaacgagtcctacatccttcagattctcgtttgagtttgtgcttaactatttctcatacaatggatatctcttcaggaccagctattcatgcaacaaatcggcgaattactgcaaaaggtgagaaatgattatataatatgtagtagcaaactagtggcgttaactgcaaaatgacatttttaattaagttccttatttgagatcctgccatttcattagtatgttatatgtttacatggaatttatatcaaaatcgaacgaagttgcaagaatcttggaaagtatgccacccattcccaggcccatgcatgggatagaaatagaatgcagtttcaaaagataaacgatctcgcgtcaatttccttttctcatactttattcggaaaatctcatctagattttacgtgttcaaattttaaccaagatcctaaaatgatggcttagctggttattctggtgatcagcttagattatcccatatgttccaagcgtgacctcagttggacgagctgatcatttctagtggaaccacacaaagaggattggtaacaactgaattagtagaaaagagtagatcgaaaagagagatgcttgctagctagataggatatgcatatatagcactcatgatatgggccaatgaaagttgtagaattgaattcagttgatatgggtggtaggtcatgtgccagtctcttaagaatgggtagcacagtttgttaagaaaacactttgaccactatggagaagccctctgggcattaactttagagaagttttcttcaacacgacaggcaagaggagacccccaaacacaaaccgatataactcgcaagaagctggggatatcatggtttatagacgcatacataaaaagggagcaaataaatgtgtgccaaccgttttctgttgttactgtgcttagcaccagggacttgctaaaattttggtacctgaaatctagacaacggttagaattgtatttttttggaatattgggcttattatctagcatttcattaaaataagggagatgctaacgaagtttacatcttacatggatgagaggcgctccctcctttaggctatcttgagtagatcccttatcacatcctctattttatatcatatttcaagcttactctgtaaacagtgtcatcatctacagttccgcggcccctatttcatcctgtctactggacacagtcttaggcggcgctatcgcggattagggctagtttagaaggaatggattgaaaaggtctaaaattctgttgctgttaacaaatgaataataaagagattttagcctcttcaatctgctctaatttacttgctctcaaacacactcttgaggctttgtttagttgcattaaattcctttatattcaactttgactaggaataggaagagatttaattaatccccttcaattttcttaaccgaacatgccctaaggtgtccattaattactcattacattttgggcaatcaataggggtgtagcaccccccccccccaaaaaaaaataccaggtagagtattcatctctaactttggagaaagccgcttgggtcgatttgagattgttatcggttgtactaaaagttgcagtaccaaccttgtagttaaagtttttttattcgaggttgtttggtcgtccaaatatgcgtcacaagattttataaagttaatactaaaataatctgtattgtatagtcgtcacaagtatgtaatggtagcaaacaattaggcgggatgcatgagaaacaaccaaaacaaaattatagatctctaaaagttatataactttgtatttcacataaaaaattatctaaagtcgttttaatgacaaaatattttaagcttgtgtttctttgtcgtcttcagaaaatagtgaacgttatcaatatatcctttagagcgtcaatgcatgttttttttacgaaggggcgaagccccctatttcattaagaaataggcaagtttgaaacaaccgcgcaccacgcggtaaaacctccaaaagaccaaccacggccagcaccctatctagactctaaccactatcacgagatcagtgaagagcctacgataacaggaaaagttttggcctacgaaggactacataagactttcttatttacatcccaacaagacagacagaagcctcaaaatgaactgaacagtctagacagcaaaagacagacaactatccaaatcaacttcccagttccagcttcgtatcattcagaaatacgcctgtcgagagggcaccaccccgaggcccttccgaaagcttcacttgccgtctttcggattaacttgcttcctagcaccaccattctttgctccttctttttctgacgaatcgcccaagaatccaaccagaagaagcaaagaaaaatgatgttagacggatcaagtaaatgattttttccaaagcaccaatcatttctagtgcgccaaatagcccagaataaagcaccgcaaccaaataacacaagatgagcaatcttgtcttttggtttacaaaaccaattgtcatacatatctttgatatttttcgggattgatctcaaattcaaagcaacttgaataactctccacatatattgagcaatggggcatttaaagaacaggtgatcaatagattcatccaccccacagaagcagcagtttaaagaaccaaaccagcaccttttcttcaggttatccttagtaagaatcttatttcttaccactaaccagaagaataccttgattttatgaggcaatttagatttccacaaaaacttatatggaatcaaaatttgattttccattttctttctgtacaaagaattaactgagaagcctttttccccagagtccacacaattttatcatcatgatcagatagacttacctgattacaataattaatcaattcatcaaaaagcaacctcaaattacccacaatccttcttctgaaagtaagagactcaaatttagatgtgaaaacctctttaacagaaacatctttatcataggtcaagtcaaaaagaacaggaaactggatagacaatggttggttacccaaccaagtgcttttccagaaactagtattcaaaccattgccaacttcagttttacaatatttgtaaaagatgtctcgtaaactcaggagtttttttccagaaatgagagtcattttgtttttgcttaaccaaaataaggggttttcccttaatgtacttactagcaataatcttttgccataagccattcgaattcttaatattccacaaccatttagaaagtaaggaatcattcataacttcaagatttaaaacacccaaaccaccctgatttttgggagagcacactgacacccaatcagctaaatgaaattttttggactgctttcccccctgccaaagaagcctccttctcaacaaatcaattttttttgataacagtcttaggggcaggatagatcgaaagcatatataaaggaacattagaaagacaactatttagcagagtaagtctaccacccagattcaggaatctaccctaagcgtcaatgcatgttgtatattcattcacggttcatctgcattatttatataaaaccttattgttgatgcaatcttttgtaaacatatgatacaatcaacgataaatttaagaaatctaaacaaaaagataaccattgcaactataccatatgagaggatgaacgtgctaaccttaattaagtgaaatattcaacaaattcttcaaaaaaaatgtacaacacatcctctcttatagagtattattttaccttcatacatagtacacaatatatcagaggattaactcacacaaacgaagaaatattacacaccaaccctcaaacttatgtagccaatgaacaaaactcaaatctgatttgctactgatttctattacattcaaacatatcgacttgctacttttcctatcctataaattatataaatcaaccacaaatatcaagaaatctaaacaaagaataactacttcaactctactatatgagagattgaacttgttaaccttttttcacacttaaatgagagaaatcttcaacggattcttcgaaaagattggacaacatctcccctcttttttcatcagcttatggtgacatgaataaagagttccatgttccatatttcatgaagacgtcgaacatgcatctacaaatacatttaaattgaatggacgctttaatcatgcaatccttttatccgtttcttgtagggcacacagctagaagatgagaacaggcgtctaaaagaacaagtaacagaccgtatatatatatttctctatatatgtagtgccaggacttcggttgtaacaaaccgtataatgaggaggacgtttataattccttattctttataagcagatgcctcaggtgctaacggctggcacaattaatggtggttgctgctgctgcagaaaatatcctcactgaagacgggcagtcgtctgaatctgtaatgactgcattgcattcaggaagctcgctcgactgtgatgatggttccgatatttccttgaagttgtcgtgagtgcactccaaaacatttatgcttaatttgttgcatgagcaattatgaaacacttatgctttgaagttaataataatatatgcctggaagctaagtagaaagattttcatgaaaaattaaatcgtgcatggttttctttgtacccattagatccttaaatccaaaggactatgaactctttgaccatgcaggttgccttgaaaggaaggaccatcgcatcgcatgttatctgcatgagtggggctgacaccagtgcttctaagaagacaaagactgggatagtcccattcgcggcattatattggtttaaccagatgtgctgtccttgtgcatgtctgtacttcaaagtggctaacgcgaaatttgtatatataatagtgtatgcgctgcgttatcttcgttctaaaaatctgtattgtttcgttgctggcgctatattgttggtgtattatatatatgcacttaactgttatctatactattctattaaaaatataatatagacatctgatgcta

SEQ ID NO: 20 - DNA, 21564 bp, Zea mays
  misc_feature (17193)..(17292): n is a, c, g, or t
  misc_feature (18048)..(18147): n is a, c, g, or t
ggcagttcctcgctggtcctttgcgcaaaagagtactctctccctcctaccacacacagcctccggactgctccggacgcgcgcctcagatctactccaacacctgtaaggattcctctggccgtgtggcctttccggcaactatagctagggttctccttctcccctccctccgcccgcttgctcttggacggtgcttcctcttctttaccagctagtcaaagtaaccacgcgtgctgcttcatctctcccttccttcctgccgtgtggttgttggcagccgcagcggcggcgcccgcgggtggaggagcaggagaggcggcgccatggtcgggaccgggaagagggagcggatagcgatacggaggatcgacaacctggcggccaggcaggtgaccttctccaagaggcggcggggcctgttcaagaaggccgaggagctctccatcctctgcgacgccgaggtcggccttgtcgtcttctccgccaccggcaaactcttccacttcgccagctccaggtacctttctttctatctatggaaatataccgtgcctgcctccttgtatcgttctggtttgatcgatgcgtttaggactccgcgttgttggattttaatcccgttcttccatctggtctgggggcctgcatcttggtgctggatgccctaatttcgattccgtatttgttttcctttgattgggcgtattaattgcttgatcggttaattccaaacttagaaacctgattttcctatttcttgagatcggggattcttgtctccctgtctccaacagcttgggtaagtggctgatccggtgtccttttctagaccaagcttgtctacgacaagtgtcacatgtggattcatatttgatgccggtagttctgttgatgatcgttcttgcttgtttcctaataagtttcttttcccccattgtcgacaacgacttgagattgtttgactgtcgtttcgagatcaatcatgtagctgggggtgtctatttttttctattaacccccgagattctcatatgcttgtgcttgttctaagttgggatcggaggtggggaaacattattattccttgattttatcctgtagctgcctaacagtaacaggcgttattcttttttctatccgcacaatgacacttcaagcttagtggtaaattcgtctggttaattatttgcaatgtaatgatactttcaagtaatcaggcaatgcttttcagtaatccaccccaaaaaaatagtgcgaaattcatatgatcagtcagtgtggtttcatcgtgtatataattccttacatccaggtttcatctgtattgacatgtatcgagatggaataaggatcattttcttatcttgcataaacattactaggaatattggatttgttttaaacatttcaatgacttgtttcaccgctcttctactattagcatcctagaagaatgcaggttttatttttatccttagagttaatctttttaaattttaaccaattacacatataaagtatacttatttaaattaataaatattaaaatgcgtttttataataaacatatttaaatgttggtatcatttataaaattagttaaaaatctaaaaaaaactctttggataaagctgtgtgcgtgtttttagaacagatggagtatatataatactaaaaagaacttgaaatgtgtggagactagacagatagaggattctctctacagcgtagacggttctctcttctggcaacgtgacctaaaagacagtgctctttgacaaaaagtagatgtcacaagtcttcgttctgatctgcaagactgcaatcaaatcttttgtccaccttttgtacaagttgcttcgatttccatgtttttctactgctcttcttccaccacgtttccatttccttttttactaaccgttgaatcgtccaaattaaccggccggacatcctacctagctggtcacggcagacagagctttctctcatgtatcccggccttgccaggaaatgcctcgagatgttcatgcgaccttacatgactctgactggtaccttttcaccctataaaaatgaaaatgtgttacctcatttcatactctcatgccattccgttttaacttctgctccctcggttttgaaaaataatgtttttatctttagaattgaatttattttaacaacaaaaacaataataataatttaaacagagattaattatgctaatatggttgttgtatatatatgcgatatatttatataacacccttagcgatacaagggagatacatatatgttgcattcctactataggtaagcaagttgatgagtgtgctataagttgtaaagtaaaaatatagcacaacggtctataaaatcatttttatcttacatcatatatatttgagatagtcttaaatgcgaacttatgaaagttgtggattgataaaatctaagttaaataaactaatctattaaatgaatttaattcatctaaaataaaaggatccaaacagcttcttagggattttcagttgtactatatgttaaaccgtcctgagtttagctattttttttaaaaaaactataatatttaagagtttcatttgatatactataaaaatattctcacagtttatctctttgtactgtaaatattaatactactctcttattctctataacattgatcaaattttagatgatttgacttaggacatatgaaaacctcttatattgtagtaggacgaattgagtagaaattaaggtttatgtatctataactttccaatggaatatagcttagtattgcaaattgtttatatagcatagcattaaacggttcactctggccttctgcttactcaaatttaaaacatcttttttacgttggtgggtttgggcacatgtaggctgtcttcaattgagagtttttcccagtctcgataacatatatggtagtaaaatgctctcaactttgggtaacaaatcttgtcggtaaactattgtcatgtacggccacacatacgccaggcgtaggagagcccgcgatgtgcgccgagctgagcaggcagcaaaagcacatgcgcagcaggtgagtggctaggatggaaagtagccatctgattgattgcgcatgcagcaaacatagaaggctaccacctgattgattgtgcatgcagcaaatatagaaggagattggctaggagagaaagtagctagctgattagtatccttcctattttgattagatcttcaatcaaggagaaccttctccatttgtgtaagccgccggctatatatagccatgtatgggggcacttgggaatcaatcaagaattacctatcaagtctcttcctctcttctctaaaccggcgaccaggaggacttctcctgtcgacgggtagctcggcgtgggggcataaccctgccggcaaccacgggtcaaggctacgatctacgtagccgaggtcctcctaccttgggcaataccgcccttgacaacctggtatcacgaagccgacgatcctcttcttcttcacaaccatcaacttccaccaccgcagccactaaacagccctcaaccccaccctcgccctcagcctccaccacttccaccggtcactccaacaccatgtcggagcgccctccatggccgacctcatggagatgatgaaatcctggcattcggagctcaagatggagatcaaggagatgaagatcgagatggcttcccttgaaggacaaggcatcatcgtcatctggcgttggtggcggcaatcgcatggagcctcctcgtgaaccggatcggccccccaggttccagaagtgggattttccccgttttgacgggaagtctgacccacgcctcttcctcaacaaatgtgagtcatattttcgtcagcagcgtaccatggccgaggagcgcgtcgggatggcgtcatacaacctcgaagacgtcgcccaggaatggttcatgcaacttcaggaggacgaaggcacgccgtcgtggggacgtttcaaagatctcattgatctgcgattcggaccagcgctgcgctcggcgcccctctttgagctgacggagtgccgacgcacggggacggtggaggaatactccaaccgcttccagagcctcctcttccgcgctgggcggctcgacgaagcccagcgagtccagctcttcacaagaggtctgcttccacccctcagccacgccgtccggcttcacaacccggagacgctgaccgcggccatgagcctcgctcggcaagtggagctgatggagctcgacaagatggcggcagccccggccaagccggcgcatcgcgctctaccggccgccattaaacctccgcaggcgcccccactccttgcgctaccggcaccaccggcgggtgctgcgccagccgcacgtgagcggcaaccgggtcgtcgtctctccgtggaagaacagcaggaacgccatcgactcgggttgtgcttcaactgcgatgagcagtattcccgcggccacaatcgcacctgtcgccgcctcttctacgtggaaggcattgaactggagatggcagtcgacgccgcgggcgatgctgtcccagcggaggagggccccatctactccctacatgccgtggccggagtgccaaccttcgacacgctacaggtccgagcgttcctcgggaccgccgtgctggtcgccctcctcgacacgggatccacgcacaacttcatcggcgagcgtgcagcgtaccgctccgggatgcacatccaaccgcgcccaaggctcaccgccaccgtggctaacggcgagcgcgtcacgtgcccgggggtcatccgcgacgcgccgatcagggtgcagggcgacacgttccacgtcgacctcttcgtcatgcccttggcaggtttcgacctcgtcctcggcacgcagtggttgggaaccctcgggcccatcgtctgggacgtcgccgcgcggactatgcagttccagcgcgagggacgcgctgtctgctggaccggcctcgcatcctcggtcaagccggtcgtccgcgcagtcacggcgccaccgacgccgacactacagctccagccagcccaggagcccctcctcgacgccctccttcactccctcagccacgtcttcaccgagccacgcggtcttccacccaagcgctcccgtgaccaccgcatcatcctcaaaccgggagcgctgcctgtggcggtccgcccgtaccgatacccggcggcacacaaagacgagctcgagcggcagtgcgccgccatgatcgagcaaggcattgtccgacgcagcgactcggcattctcctcaccagtacttctcgtcaagaagccggacggctgctggcggttctgcgtcgactacagggcgctgaacgcgctcaccgtcaaggatgcgtttccgattccggtggtggacgagttgctggacgaactccacggcgcgaagttcttcaccaagctcgacctacgctcgggctaccaccaggtccggaggacgtccacatgacggccttccgcacccacgacgacctctacgagttcctggtgatgccgttcgggctgtgcaacgccccagcgacgttctaggctttgatgaatgacgtgctgcgaccgtttcttcgtcggtttgttcttgtgttctttgacgacattttgatctacagtaagagctggggagaacaccttcgacacctccgcgccgtcctcgaggagctccaacgccaccagctgttcctaaaacgcaccaagtgtgcgttcggcgcgacgaaggtcggctaccttggccacgtcatctccgaggcgggcgtcgccatggatccggccaaagttcaggccatccgggactggcccacgccgcgatccgcacgggcggtacggggtttcctcggactgacgggctattaccggaagttcgtccaccactacggtaccgtggcagcgccattgacggccttgttgaagaaggatggattctcttggagcgcaggagccgcggaggcgtttgtcgccctcaaggacgcggtcacctcggcccccgtcctcaccatgccggacttctccaagccattcgtcgttgagtgcgacgcatcgtcccacggtttcggcgcggtgatggtccaggggggccaccccatcgcgttcttcagccgggctgtcgcaccccgtcatcaagcgctggcggcttacgaacgtgagctcatcggcctcgtcctagcggttcgacactggaggccgtacctttggggacgccggttcatcgtcaaaaccgaccactacagcctcaagtacctgctggaccagcggctcgcgacgcttccgcagcatcattgggtcggcaagctcctgggcttcgatttctccgtcgaatataagccggggtcaaccaatgtggtggcggatgccctctctcgccgcgacacgccggacgatggggcgctgctggccctctcggcaccgcgtttcgacgtcctggaccgtcttcgtcaggcacagctcaccgatccagcactcactgccattcgtgacgaggtgcaggccggcaccaagcgcgcgccgtaggaggtggtggacgggatggtccagtacgcggcccggctctacctacccccttcttcaccgctgctttgtgaactgctcgcagctgtgcatgccgagggccacgaaggggtccagcgcacgctacaccgccttcgacgtgacttccatttccctaacatgaagcaggtggtccaagattatgtccgggagtgccctacctgccagcgccacaagtcagagcacctacacccggccggactcctccttcccctaccaattccgcagggagtctggacggatgtggcgctggacttcgtcgaagccctgccccgagtgcgcggcaagtccgtcatcttgacggtggtggacagattcagcaagtactgccactttattccactggcacacccctactcagcagagtccgtggctcaggcattcttcgcagagattgtacgccttcatggggtgccgcagtccttggtgtcggaccgcgacgtcgtgttcacctccaagttctggaaggagatcatgcggttgatggggaccagtctccacatgacgtcggctttccaccctcagtcggacggccagtccgagtcggcgaacagggtaatcatcatgtacctgcggtgcctaacgagcgatcggcctcgccagtggctccaatggctcccatgggcggagtacgtcttcaacaccgcctaccagagctctctccgcgacacgcctttcaagatcgtctacgggcgtgagcctccgtccatccggtcctatgaaccgggggacacacgtgttgcggcggtggctagaaccatggaggagcgcgaagagttcctcgctgatgtccgccatcggctggaacaggcacaggctgtccagaagaagtattatgaccagggacaccgcaccgtcacgtatcaggtgggcgaatgggtgctgctccgtctccgacaccgctcccctgcctccctcgccactgactccaccggcaagctgaagccccggttctatgggccctaccgactaccgtgtgctggaactcatcaacgaggtcgctgtccgcctcgagcttccagcccgcgctcgcatccacgacgtgtttcatgtgggcgtcctcaaaaagtatcacggcacaccaccgcaggttacacagccactacccccacttcaccatggggcagtcaccttggagccagctagggccatccgaacccggctcaatcgcggtgtacgctaggtgctggtgcagtggaaagaccagtcgcctgcatctgcgacttgggaggacatggacactttcaccgacaaattcccaacctttcagctcgaggacgagctgcttcttgaggagcggagagatgtcatgtacggccacacatacgccaggcgtaggagagcccgcgatgtgcgccgagctgagcaggcagcaaaagcacatgcgcagcaggtgagtggctaggatggaaagtagccatctgattgattgcgcatgcagcaaacatagaaggctaccacctgattgattgtgcatgcagcaaatatagaaggagattggctaggagagaaagtagctagctgattagtatccttcctattttgattagatcttcaatcaaggagaactttctccatttgtgtaagccgccggctatatatagccatgtatgggggcacttgggaatcaatcaagaattacctatcaagtctcttcctctcttctctaaaccggcgaccaggaggacttctcctgtcgacgggtagctcggcgtgggggcataaccctgccggcaaccacgggtcaaggctacgatctacgtagccgaggtcctcctaccttgggcaataccgcccttgacaactatacaaaccgaagataagccaatccatatttgccatacatagaaactacatttgagtttccaatgcacgatttctacaaaatatttttcagccaaatcgtatttgtctctgctatatcatctacctaccatgcatatttcaccctttatttgtgtagacatagtttttttaacaagaaatctctcacctttttagttctaattctaccttaccattttgcttacttggcatcctagctaaggacatctccatcagatcccttatctcattctctatttcaaatttcactctgcaaacaatgtcatctatagtgtcgcgtccccctattttacatgatccatcgaaggcaaccaaatgctatagaaactaccaccttcgtccataaacttatgacactattgacttttttctaaaactttgacctctttcttattaaaaaaatcgtgagttatcatttattttattgttatttgtttttatcacttaagtttgtttgagcgtgacttaacattttacattttcgaataaatattttaaataaaccgagtggtctaaatttggaaaaaagtcaatgatgtcatatattttatgaaagggggagtattccttatcctactaggactgccctaatattcaaattatattatattagcagtaactgttgaagtctgcgttttgtcattttggtgggtagtgatacatgtacttgtactccgtctataagaacatatttttttgtataaattaagataaattctaaaggttaattataaatttatataatacagtatcaatattcatatcgctaactatgtttaccatgaaaatatattatttaatagtttaattgatacttgtttagtatcataaatgttgacgttttatataaatttgtccaaatataaaactgagctaattacattttagactgttaacatttgtttttatatccacggaaattcatgcacagggaaattaagtctactcttttcgtggaaacagtgacagcgtgattaaatcactggcactacttgcctgtgcatgacatcattcaaaggaggtttaggggaaaaggttttaagggcatgtatggatgtcttgagttttgtcatcgagggtaaagttaaaaaaactcttaagacatatatcttgacgaagatacaatgtcttagctctatgctcgagacagaggactaggtaattgattaatttaatttattgaatgttttgattggttgaatgaatatagtaaatcatatattttatatatgtcactgtattatgttgtgttttagtagtgtcttatacttagggggtgtttggttacaccccgctaaaatttagcccctgtcccatcgaatgtttgaacctccgttccgggtattaaatgtagtcggattataaaactaatttgtcagccgaagattaaaagacgagacgaatctagtccagttggttgggtctatatttcatactcctatttaaaagtcaaacgcttgatgtgacccgagctaaactttagcaggagcaaccaaacaccccttagagtatagtgcagcattgtcagggttgtacatgccctgaccagtccaatctgaaggaatttgtgcatcgtagttcgttccatatctgtccggagtgtgggtgtaaaggcagtgggcatttactattagcacgagagaggctagcattgctggccccgcctggtcagtctgatgtgaagataaatgaacacaactcatattttgctttgcaacacacatcacgtcatttcgctgtaggtgtctataggttcaatcttcaggccaaaacattttattctagccatacaattttgttgtggcatgcatggatgctgccgctgtatgccattgtgcataataatattttcacccaaaaaaccctaaaaatttagaagcaccgccaatctgctaatgaaaatgcaagtgtctgctgacagttgcattgcacaaaatttaagcaggcagttaagattttcttaaagtttaacaccaggaacaccattgctacatgcatattttgtacctggaaagaaaatgcttcacgtacgatccactcgtactattaaagtacgacccacgttaatctaccatacttgttgcttcttgttctgaactaataaataacgagtcattagatgaccttagttctacgtgagtttaccactggagtcgtacgtgtagcagtgttagtactacaagttatgagatcttttgctgtcctgtaagctggacgaagtaggactgaactgaataaatccccggatcaatgcatgaaatatagatagtgacacaacagtatgttgctactagactcccagattttgcatgtagaccgatatattcattcccaaagctagcacggcatcccaagtccttgctcggttattaccagatcttaacttgttaagaatttaaactcacttaatcttcttcaatatgtataatttaaattaaaacgaacagaacttaatatgattttctatgaaaaacaacttatgttgccttggtattgaagccgggtctttatctgaagtacgtcagtcagccgtattatttaatctttactaagctgagaagtctgatcagttgatctgcccaatttttctgcagcatgaagcaggtaatcgatcggtacgactctcattccaagactctccagaggtccgaaccgcagtcgtctcaactgcagtcacatgtgagctaatctgaatacatcatgtaattgttaacgtttatttactccaaattgcgaacacaaacgcaattggtactaagagctttgggttctgtgatatgtgtgttacagatggatgacggcacttgtgcaaggctaaaggaggaacttgctgaaacaagccttaagctcaggtgaacatctaacattctaacctacggtttaatctagttcaaaagcaaggcaataatctacatgcacctgccagttttattttttgggacaaaagccttattttttttatttaagcgacctaacgaaggacatagattttgcgctactatacaaacgatttagaaatgctcccattatttcacactgagattgttgtgttatcttttgggacaaaaccccctcgtttttatttaatataagtaacctcaagaaggacacggagttcccactactatacaaacgattgataaaagccccactgtttcacagagattattgtgattttcaactgccctcgaaaacctaatagaggggccaaactagtatatatacactaccggagaacgggctatcgataggtaccattagggaatactgaacagctcgaactaaaggcgtcaacctttagtccgagttgcctggtctagtactaaagacagacctttagtatcgttccttggctcgaatcagtactaaaatgtcttagtattggttctagggttgaaccaatactaaaggtggaattttagtactagttctaggcatgaactaagatgaacttttaatactgattcttgataaaattagtaacaaaatggctagagattttttattctatatatttacaaattgatatatacatgtgttcaataattaaaatatttgtacatgtgtatattgacaatataatgtatatatgtaccaaggaccgatcatttgaaattaactccctaaacttcgaaataattcggtcatgcaccaaggaccgatcattttcaccgatcatggacgtggctacacaaaacgcagtctaaaagaaattcttaagcttaggctaaactttctgatttatatgaagtttgtatatctcgcaagttatttgctaataataatctatatttgttttcctgattttagtgtttgacatagggacatgaataatctttatgagtgctacttttgtgaatgtatttacacctttgtaggtaaagttagtgccaaaaaatatcaaggtacatcacaaatatctacaataataatgttaattttacgataaaaaatgcctcagctttgaatttgatataataataatagatttgaaaaaagtctacataactctcctacctttatagggtggtttacttcatcccatcaccttcaaaagtgttgtttaaccctcttagctttacaaaaccaaacaaataaccctctagacaattttagttggtatgatgttttgatgacgtggcactgatttaagtgacactagtttgtttttttcaattatgtcttctactactttccaaaatctatataattttacacaaaaaagtacaattagatattatatttgcactaattactaaaaataaaaaaactaaataaaaagagcataatattttttccttgattcattccttaccttataaggctaaaaaaattactagagctaaacaatacttataataaactactaatttttttattgattttattaatcagttaagtgggttttcttctaattaataactaaattaactttacattttttagaaataattaaaaacgttaataaaatgatttccaatttttacaccatctcctagctaaacaaacatacacaaatatttccataaaatgatctctaatttttacatagaccttatcttaactaaacaaacatatacaaatatttttagaattttctaaggactttaaatctagacctatataaagttctcagaaatatttatgtaaattacggctctatattcaaattttacaaaaaattatgaaaaattatttgtgtatgttagatgtaaaattgatttagttagtaattagaagaaatatcacttaatttggttaataaaatcaataaaaattagtagtttaataatagtattattttcctatgttaaaatttatttcccagaagataaaaaaccgaagacaaaagtattaatctctttttatgtagttttgtatttttagtaattaagtccttacttctaaaatttcagaaaaattagggcaaacataatatcttattatccattttgtgtaaaattatataaattttggatgacattaaatgatagaatatataaagacaaatcggtgccacttaaattagtttcacgtcatcaaaaccacgaactaaactgtccaagggttatttgtctaattttgtaaagctgaggtggttaaacaatcggttttaaaggtgagaggtgaagtagaccactctctaaagtttggaggttatgtagattttttcttaatggttttagaaaaacatagttgatgaagatgaagaaagaactactccatttaaaaaagattggagcaattcaagaaaaactaatagtgcttatatatattaagatcatatctatatacagatagttctattacaatggtcaaaaactctcggtcccatcacaagacagggaggatgaatattaagaatatagtagtcagtattaactattaaatttcatgctctagccagaaatgcttaaattgatggagcgatgtggacaattcacttgaattctaacaatctccctcacatcgagactctcttagatctcagatgttgaatagaagcgagcaccaattattttatttttttattttattgagctaaatagaatttaaactcgagatatctagctctgatgccatattgagttgcatgtaggggtgaaaacgggtcaggtatacccgccgggtatcggatacggatagtataaatacccgtttttttggatacagatttgagaatttttatattcgtacggatacgggtaatactcggatagtgtcgcttcgaattcgggtcggatacagagcaaggactacccgttaaatacccggatattcgggtcggatactggtacccggaattcgggtatttgtttttttatgcgtaataatatagtcataaaatcataacttttacatatgaaatcagatgaagataaggtttatatgaaaattgtagagctcgacgagatctataacttcgtagtacatcacatttttgtttaaacacatctttaggccaaaatcattgaaataatgtccaaatttatataaatttatagactttatcattttcatgtggaacttaaggttatatccatgtggaaacttaaggttatctttgattttctacaataagaaattaataatacaccaaatagcctaaaaaattatgaaattttacaaaggcacaacatatgtccatatataaccataaaaatgttttggtcataagatctataagatgcacgcgtttcttccattttactttaacttatttgtatgaggtacaagtgaaatcactaagtatccaagtttcaacataatcaatactttactttatcattttcatgtgagtacttgagttatcttcgtatagaatgtttattagtttttgtaacttatttgcaatttttagtgaaactagaatattttatgaatttaattgcatgttgatgattttctataggaaaataataataatacacaaatagcctcaaacattcatgaatttttatggggacacaacatatattcacatatagttctcaaaaatatttggactataaaatccacaagctactagtgtttcttccattccaatcccacttattgtgtgagttacacgtgaaatcactttatgtatcgaagttttaacataatcaatactccacttatcattttcatctggggacttgaggttatctttgaatagaattcttatttgttttggtttgcaatttcgggtcgaaactagtgtattttatgaatttaattatattttgatgattttatgtagaaagaaattaataatgcacaaatagcctcagaaatccatgaaattatacggaggtataacatatggccacacatagtcataaaaaataataggaccataaaatccataagatgtcaatgtttcttctattttatttccacttattgcgtgagttacacgtgaaatcactctaagtatccaagtttcaacataatcaatacttcactttaccattttatgtgggaacttgagattatcttcttataaaatgtttattagtcttgataatttattcgcaattcgtggtcgataagaatattttatgataagcaattaatgcattatccgacaagtatccgatatctgaccaaataataccgtatctgtcacttatccgctcgaataaatatctggtccatgtatccgtatatgtcccatttctaactatcagtatctgattccgaattcgttttaaatacattagggtaggatacaagatgatctactatccgttcgtatttgtctggtttcacccctagttgcatgcataaagcagttaaatcatagtaaattctatgcatgaatcagttcaaccaaaaaacttaagttgatatagagaggtgggcaattaacttgtattgtaacaatcagtaaacttcatagtactagttgatttatttgtatatattactattactattcattttaatctacacatgtatattaaatatccatcaatattaatttgtaaatgtatgcgacctctagctgagttggttaggtggtcggagtagcacttaggtccgtgggagagaatttgttagagtagaataatcagataatagggccaaccctagagagggtggctatatagagtacatacatgggccacatgggcctagcctcatgggcctaatccatatactctaacatcctcccgcggtctgaacttccgtcgcagcggagttcacagactggactccaaaagacaaagtacatcacaccataggatccccccacagactcaactagccactactgatgttgaggctggagcgaaactaggcgaaggttgtgggggacagatatcctccgggtccactggaaggataaaagacctcacgaaaggcctaagggcccaatagatcgtaaggtcactccttcatgggcctggggaggaacaatcagtaaagcagattgacataaggccggatcggtgcaagcccggacggccccacaacgttgagcaagcaaccacaacagaagatccgactttcacgcgctggagccccgtacgacggaaccaggcgaagataagtcggcagaactataggaagatagactcaatcagttcactatctcttaggtgcagtttgttatctcatccacatgtattgcctcacggtcgaatatataaggcctagggggcaccccttcaaaaggatcgatcccactattcagccatccaccccaactctctacgttctagctttagagagctcccttgtaacccattacataaagcatactcgccaggacgtagggtgttacgcatctcaaagcggcccgaacctgtaaacactgtccatcgttcctcgtgcatccggcacgaaccatttagctatagtcggcgacaccgtcctactccaaaaacactttgaggggcaaccccgggtgtgcggtcggacccaaaacaccgacaaaggtcgaggacggaagacccttggtgaagatgtcggcaaactgggaggtggtcgtgacgtggaggacccgaacatcaccgacggtgacccgatctcatacgaagtgtagatcgatctccacatgcttggtccgcttgtgctgcaccgagttggtggagaggtatacagcgctgttgttgtcgcactaaaccacatgctcctttttttttttttctatggaggtcgacggagatcgtcctcacgattcaggtgagcaccatgctgtctatgcgcatcctcgcatgatcggcgcccctcctgtgcgnnnnnnnnnnnnnnnnnnnnnnnnnnnnnnnnnnnnnnnnnnnnnnnnnnnnnnnnnnnnnnnnnnnnnnnnnnnnnnnnnnnnnnnnnnnnnnnnnnnnccttacactgaacgccgcgacacgcgtaaatacgccggtttttccttctcgttacgtattaatcactcgagtctttcgtcggaaaataaattttcgcgactcaatctgcgtgctggcatcttccccccactccaggtgagtcaatgctgtcgaagcgcaccctcgcggtgatcggcgccacgccggtgcggtcgcagaagacgtggtcgtccggggtgtagcggcgaattgtgaggaagactcagtcccgcccgcgtgcttaagacggcgactctggctccaggacgacaggtaccatgaggctaatgttttggacactcccagcctgaaggtggagttgagccatgagcgtgtcggccggatcgtgccatagcatcgtggtggtggaggtggtgcggtgcatggttccgacggtcgtcgtgcccgggacgctgttcacgacacctgcggtgtcagaggaggtggccccgccatcgtgggccgcaagtgaggcgaggagatgctccgccgcggcaatctgagcagcgatagcgtcagcagccttgcgctcgcgctcgcacatgagggccgcctcccgcagacgggtctatcgtgccgcgtgctccgcgcgggcagcggtgagggcggcgatggtgtaatcctggtgggagaccggtggaggcggtggcgtatgacgacaggaggcggatcgacgaccggcgtagggggatcggagggggaaggtcctccggacccgcaaccctgctggaaccgcgnnnnnnnnnnnnnnnnnnnnnnnnnnnnnnnnnnnnnnnnnnnnnnnnnnnnnnnnnnnnnnnnnnnnnnnnnnnnnnnnnnnnnnnnnnnnnnnnnnnnaattctttagaaggaagatgagattataaatagttacatcaagaagtgacatgatttgaatactgatatttctgacatgccagatgaggcatctatacatgtttttcggaagggtctcatgaatcgagaatagtctcagaaacaggtacgcaaagctccaaccacaatgaattaattgttttaccctaccggcagcggcggcggccccggtacccgcgcggctgggcactcggggcggctccttgacgcggggatccggggctcgcggcgctgggcggctgcgcccgagcggctggggcgtgcgagaccgctggccctggcagggcggagcgcgggcggcgcactgctgctggcggtgcttgccctagctcgagctggggccgggggcggctgtgtggctggcggcgctggagggcaggggaggggagggaagaaaccctagctgataccatgttagattagaagaatcagataatagggccaaccctagagagggtggctatatagagtacatgcatgggccacatgggcatagcctcatgggcctaatccatatactttaacagaatttcacgttgtggttaaaaaatcatctcgcatgtcccacgtcaaagcacatatctaattaagttcggtcatggtcgttctcatatgggctatggtgccgatgtgtatgtgtggggcaggggttcgagaggttttctcgacttgtgtgaggtcttcttaatataatttccggggttgtcagaatttcacgttgtggttaaaaaatcatctcgcatgtcccacgtcaaagcacatatctaattaagttcggtcatggtcgttctcatatgggctatggtgccgatgtgtatgtgtggggcaggggttcgagaggttttctcgacttgtgtgaggtcttcttaatataatttccggggttgtcttaggctatctccaatagcttacccactatcgtatctatattcaaattctactctacaaacattacaacctgcagtataaaacagtgcaagacagtgttttgggtggccatatgcccatatgggtgaactgatggacacggtcgtacccatgcaggttgatttttttaatctgtaaatatataggaaaaaaattcgaacactagtggttccaatcggtagtaagaagtccctcgagggcgcctatatggcaggcgtggaaccctaccatttgaagccatcaaccgacactgaaggtcctttagtaccgggtcatgcaaccggaaccaaggattagcgcatttaggggttgtttggtttcctatctaaggcgccacaatctgcctaaacttagttgttcgaattgaagaactaactttaggcaaaaaagttaggcacattgtggcgccttagtcaacaaaccaaacaaactcagaaatgtagctgattttcaatcgatactagcccttttttcagtagtgtgatagaaggtggtcttgtgggtgtaaggtgaaagccctagccacattttggtcgttgcagtaaagccggtaaggtgaaggccggcattgatatgaggccccattccacttacttatgtaacttaggagcaaacctagttcgattttgtcatgtgatcaacaacgcccattatgggtcatgttcttctaagaggtatcatctcgatatctctctctatcctaaaacagttgatgctagatttttcgtaacacttaacatttgtcaagtttgactagatttgtagaaaatatttaataacatttatatctttaaataagtttgttgtgaaaatagatttaaagatctatctaatctaataatactaattttgtattataaatatcttttatatatatttgatcaaaattaaagctgggttgactcctcgaaagtgaactacatcttgccgttgctggcagcttaaggtatgaggtaattgtttgtttcttggttgtcgcttgtggagctgactgctgccctcttgttgtgggctctttagatgtcgcttagtcgtcgctgtggtgctacgaatgctactctctggttgttattgtttggtgtcgctgttggtgttttttgtgactgcccactagttacggacaatgttgtttgttacttggtgatcctcatggagctactctctggttattgcttgtgtgttgttctctgggtatcagcatgttgcagaagtaaccgttaattgtctacaggcagatgagaggagaggagctccagaggctgagcgtcgaacagctgcaggagctcgagaagaccctcgaatccggcctcggctctgtactcaaaaccaaggtaggtatgccctgctgatatactcatgagttggtgacagcatcagactgtatacagtacagtaatgatgcgtagcataacataaccatctcttttcttgggaaaaacaaattgcagagccaaaaaatccttgacgagatcagcggtctggaaagaaaggcaagcatcactccctttccaaactgctctagttagtttatctcgaaaacaaacaagatgctgatgaaagatgcagctggactctttcgcattacgttgttcagccagaaatcccgtttcctgccttctgaattctgacagcgtccgtcctcacctgtgttgttaaacagagaacgcagctgatcgaggagaactcaaggctgaaggagcaagtaaatccctgctctctctcccccaccttctgaatgaatgaaggtttccattccgctctccgtttgtttcgaccgacgtctcggaggtttaagccaacggggacctgaagctgcaggtgacacggatgtcgaggatggagacgcagcttggcgccgatccagagttcgtgtacgaggaagggcagtcgtctgaatccgtgacgaacacgtcctatccgcgcccgtccaccgacaccgacgactgctccgacacatcgctcaggctcgggtgagttggggggaaattccatgtaaaacatgctggcggctcgtgagtaatgaacctgcatgctatttactataggctaccactcttcagctccaagtgacggagatttgacatgtccggtagcggagcggtgccgattgcttgcccttctccactctagataggtctggattgggggagagcaagcactgctggatcgggaagacccaagtgaccaacgcgtcgcatcagaataaggcattttgagtgctgtatgatgtgtgtattctggctctgaaagtgagacctgcttttgttataatacatacatacaggcagcatggcaatacgtgacggggtatccgctgcctgcagtccgtgacctgtctgtcgtctctgtttctagtacccgtataatcaccctgcaattacctgcagctggtcatcgttaggagaaactccagtccatgcaaatgaactcccagcacttgtgctcttcgcg

SEQ ID NO: 21 - DNA, 4417 bp, Zea mays
aaagcgaacaatccacaattcccagtaccctcacgccggcatccgtcgaagctgctcgacctcgactcaagccttccttgctccttgccgccgtcgagtcgtcgcaggtgaggctccgcgaacccctctccgccccggaagccgtagtcctccggtcgaaatatagtgtgcaattctgttcctgtagaaggtgctgcttctttctctcgaacacagcaggtgctgcttttggaattatttgctcgtctcggcgttccggcgctcagaattggatccgttcctggccaggattactcgttttagtagtgtagacttgttccccagatgccgcaccagttcggaagtttattcgcaacagtttgcttgggtctgttcgtcctggtggctgattcagtatccttgttgcaggaacgatgacccggcggaacggctgtacgatctacgtgggcaacctccccggcgacatccgcgagagggaagtggatgatctcttctacaaggtgagtggttggttgggttgtgtaccgagcttcccaccctatttttagggcttctcgtcgaatgctagatccgtggggaggttgttgtggtgtcagtcaagcctgcgagtatgatatggggagattagaggagtgttggggatgttagaggagtgttggggatgttttctttatggctatggctcaatattgctgaagtcgaagagatgcctatgatgtaatgtagcgtttgctcatattgatatttgcagtttaataaactcttactgtgagttttataatcgtcgtgtgtgttagacaatgcacttgtttttttcactgtattgtcacaatctattttggtgatgattgaaagttctgttcgttgtgaacttcaccactgctaattgtgttttgccttctaacaccatctaatctaatatggatggagctctggaagggaaggcaatgtggattgcgaatggtcaatttttgtttgtatctctatgactctactttggttgattaactttcctggatgttaaatttatgttttaccttctgcttctgcagtatggacgtatagtggaaattgacttgaaaattccaccaaggcctcctggttttgcttttgttgaggtaagttggccggtgtctgttttatatgagggtattttgtactcaatagatttacatccataatttgtgccaggttgaatgttttttatcacaaaccttgtgttttcagtggcgaatttttaggaggtttaataccttcttttaaggaaactaaaaagaatattgcctaaaacgtttattgttccaacatatgaacatatctaatgtacgcaacaatgacaaccatggaataaatcagtaatgctaagtactctattaaatgttatgcaaggattactaaattattctctaaaatcaataatctaggcagctaagatgatggaagactaacagcacagtgatgcattttgcagtttgaggacgcacgtgatgctgaagatgcaatatatggccgtgatggatacaactttgatggccataggttgcgggttggtggatcttgatgaagacctgtttcattagagatctccaggttacagagatgatagttatctgaattattctaatgttatttataatctatatacaggtggaattagcccatggtggacgaggcacatcttcttttgatcgatctagcagctatagcagtgctggacaacgcggtgcctcaaaacgttctgattaccgtggtttgtatttttttattcccaaatttcaaagcttataacttgaaaactctctctgttcttactgtatcggttcattgattatgcagttatggttactggattaccttcttcagcatcatggcaagatctcaaggtttggtgaagatctaaggtcattagctattgtttttgccttataatccttaattttactttcatgttcaggaccatatgcggcgagctggtgatgtctgtttcactgatgtgtatcgtgaggctggaggttaattttgaaacgttctgatgttatcaatttattacacatttggctgaccttttggatagcatgactgtcgttcaaactgtatcaaatcatattttagaaggaatgtctataaaaactcgtatctaattttacgtttatgattgcagcaactattggaatagctgattatactaactatgaagatatgaaacacgcggtatgttttaaagtgttttcttcttcttcttcttccctttaaaatagaagttgtgtactgacatgttttaaataagattgatcactggaaaaggagaaacttcgtgatatgtgtaatctttgtacctgtctgtgcatacttgcatatttccatgaagatatgtactgacaactagttacttttatcttgtagataaggaagctagatgattctgagttccgtaatgctttttcaaggacatatgtccgggtatggtcatctttttgtcctgatgattagcagtattcaaatgctgtatcggctcatttgtttcatctcatctcaaatgaaaattagcatgctctcatcatttgtcttactaaaggtgagggagtatgatgctaggcgcagccgttctcgctccagaggcagaaaccgctctaagtcaagaagcagaagccacagccactcgtactcaagaagcagaagctgcagttatagcaagagtaggagcccaaggtacatttttcaattttcttcatgctcaaatgttgactagggtacatcgaaggtgtaacaggcttttttttctcaatgattcagatctagatctgcttcagagtcaaaatcacctgttaaggcaaggtatgaatagttgaatttggtactgaatggtttgaaatttagagaagttctgttttcaagtaatagtagctcaaaatattggtgcctacaattgcagggggaaaatatcagcagcctagtttttttctagatctgttttgaattttccctttttgttattgtactttatggtttatattatgcttcttgatgctgcatttttcattatatgagtttggattttcactgcatctgattaacatgtaacattgtgtgtgactggatagctattcttcattgttgaagatttgttcttttcttcactagattggggcaatgtgaggatctgggaattgcattggtaggataatggaatattgagaacgtgatgatggtttggaacgttggatagtcacagctggattgtgatgcattgtatgacaagtggactgccaccagcaataggagcaagatagggctggcaccacacatacggacaggattttttggtataatcgaatactattgacttcagcacttccattctgaaatataaaaccttggtctcaaactcttaatgatgaggttgcagccttaccctcaaatataaatgtgagctttaacattgatttttctggtaaaaaagttgcacaactgaaacaagaaagctgtggccctgttggaccatttcaatccatgttggctatatctttgtttgctgaattgtagtttcctcttatatgaaattgcaatttctaaatagatttgagcttttttatatatattctgaatggcagaggcacgggtggatattgcatgtggccgcttaatattttcagaatatatatatttatgggttctacgatatttgggctaaatcatattttcatgcagcattatggactaacatttttgtatacgttttgcagatcaccatccagatcccctcctgtttctgtaagttttttttgatataaacaaagtatttttatccaatacttttttatgtgaccagctgagtgttgcacagccccggcgtgacaagtctgcaagcaggagtcctgccaggagcaagagtctgccccgatcttgttctccggtacgaaacttccatactattagtcttgttggtatgcagtatgctaatgataaaccatatatatatattttatgtattttgtttggttgattgcaggcaaaatcagagtgaatcggattctgcacttgaaacgttcagaaaggcagagctcgagctaaaagattgctgtacggattatgagcactgtgctagtagcattgctgtcccttccatatttttacaaatactctgttctttgaggagatcactgtatgctactactctgtacctgacatgatgcaaacgttgttggtttttgaacttagcagaacgatgactttgatcagctccatccattccttccattttttttttctgaatatttcaaaagattgtagtatgcagctattgttattctctgatgcactcctgtgtcctgtcattgtggaaaaaaaatggaattctaccattcatgtgatgtgtctaaaaaatgcaactctagcttgcgattagatgcagttgttt

SEQ ID NO: 22 - DNA, 7007 bp, Zea mays
aatttggcccggggcttcacttaatcctggttccgccactgcagcgcaacctcgatcgcgcacagaggcccattccgccgaggagtggcacgaggagagacgacaggtgcggggatggggtcagttttgctgccaacgctgcggctgaagagtgaggtcgacgccgccatccgcgacaccctcgataaggtcctcgttctccgatttggtcgcgccaccgacgccacttgcctccacctagatgacatcgtgagtgccctctctcgtatccctcagaccctgcatgagggctattgttgcgctgagcgatcctcgggcctttcatcacctagcacgaacctcatgctctcttcccctctggccaccgtactcatagcctgggtccgctgtgcaattttgaaatgaatcggtgctggttagtttgagattggctggttgttgctgtttgtgaggatgcggtactactgtctactgtattacctttttttgtaacgcaagggtgatctgccgttcaattaaaaagagaaagagttgatccagtttataaggaaaaaccaaccccgaaaaccttacaatcacacagtttttttagatgaaaattagcaaaaaccctaaacacgagaacctagatgactaacaagcaacccatttacacacaaaggtggcacacaaccgatggagcctaccacatattattgttgcggagcttatcacaagccagcgataagaagctctgacttcccacgataaacatcagccaaagccccccaacacaccgccgtttgcaacaagccacaacttccatagaaaaagaatacagtgtgttatcgttgccacttgccaagctttattgcatcccacaaccaaaacaactgtgacttcaaaactgcagatccacatccactctagcagaaccggagatgtacagcaagacggaagaaccataattactgagcggaattagtgtgttaaactgttaatcaaagcgaatcagttggagcagtgggttcacacttcacactgcctatggtcaaaattttctctgaaactgctagaatgatgtggggagatgaaatgcacgtaaaactgtttggtggtttgatcacatcaacataattccaaacacaagttacatttttcttagctctgttgttagtgtcgcactgatagcaatccctctcggtgtgaaaatggaattaataacttggtatgcaaaaccctgcaaacctattattttgaccataaaaagtgtcattgaggttcttattttctgtattctaaattagcgtctgttaaatctgcagaggccaataaaacaaggatacctcacatccttattagtgatagtctaacacccaacatccacatttgttcagtattatagtatgtatacacgctgtttagcagattgttcgtttacatcctttccataggttaagtatatgcctctgtatgtctgtaattttatgaaattttataattcgtcatgtctgaacagctggataaatcttcttgggacatatccaagtttgctatggtagcattagttgacatggactctgaggagattcaagtttacattgactactttgacattactttggttccagcaaccattttcttcttcaatgcccatcacatgaagatggattcagggtaggttcttttccacttaaaaagaatccattctcatcaattggagcctttcctttcatatgttagtttttttacatgaactcataccagaatattaagtttttttgcttgctgaatttgaattggtataattttgaaaaccgatatctttgtcttacctatttatgtctgttatctcatcatcatggtgcttttggtttctcatgtcatcaatatgtaacagaaatgaactttgcaaagctagattctattctagtgcttaaggctagaaggaatagggtcaataataaggaagtaggctgtggaaggtatgcgttgaatattaaagagttaaatgataaaagcagagaactagtttattattgatactgttggtgagaacttctgcatatgtattactgctatatgaaatacggcctaaatgtctgaatcctgatgaacttagaatatgatgtattcatttagcaactagcagagacatctaccctgatgtgtaaataattatgtgtaattaaaaactgcaaaagtaaattgttttgaacctctgttattcttattttgcataaattcgtgagattaaatttatatcgttacttctattatctattattatgaaatctaaagtagatactgaggtgatatgcaacagcgtggataatttttagtatttttgctcgctatatgtatcatagttttacctgcaacagtaatataaaatgcttattataatgtaaatatgcaggacacctgaccacacaaaatggataggttcttttagcagcaaacaagactttatcgatgtagttgaggtgagcaaaccatgactgctttctctggattgcaatttatatttccctcttcagttaacatctaacaatgccattgatttatttgtgaattttctacaatctagaaaaaaaggagaactggacactttgtataaccatatgtacatgttttgtattttttatcaacccaaaaaaatgcagaaaacacaaaactagaaaaatgcagatatttggataattttagttgtttcgttaatcagttctacggtaggtcaagctgagttctgctggagacttgtcaacttgtcctaacacatgcacttcagtagctgtacagaagtcatgttagttagaaatgtaattttttacacacatggtactaaggaagcaacgaatggccaatgattgagcaattccttgaactctactggcacaaactctttactgtgttgtattaaagtaacttgctagtcagtgttctgttcacctcggtgcccctgctttatgatatcccctataataacacctatttgaataggggcgtgtttggttcggcttttttctgaccagcttttcagaaaagctggctgtggggaaaagttggctgttgggaaaagctggtggttagaatttaggtgtttggttcgccagctgtgcaaaaaagctgttcgtgagaatctacgtgtttggataatcagattctcatattgcagattctgttcgaacaaacgataaaatgaaacccataacgaacaaaaggtcattacacaataattagtggagttgattacatcataagtactgttacattgacatacttaactacgacactaatgcattagcaattgcatctcgaaaagcactcatgtctaactcatcagatgtgctactactactctcacctaaaggtacatcatgactgatgctattaggtcctagttcatcaaagtctctatcgtgtaaccgtgctgtccaatataattatggcttgctctgaggccgggactgccgctggaaagtgactaccataatactgaacagaagcctctgttgtcggacgaccagcatctaagtgccctttcattaagagttttccactgtgtgaacattctctttaaggagtcccacctattcttcatttgatccctactgcaaggagaatacaagcaagagtacaatgaagcaagggagtaactacctacctgaaggacagaattgatactttgatagaacaattagaagttgaaagcaagagagtaacactgcctgaaaaatgaatagttaggaaaaaaaattaatggtaatgacacttagctatgattaatgagcacacacctggagcaacaaagtcacatgttttaattttttagttatatagctaatataacaataatgttcatttccttcaagatttcagctgtaagattaaactaaaaaacagacattaagtcatggttgtaccaagcaaatggagaactctgtgcataaaactgtctagcgcattgaaaagtagaaaattgagctcgtaattaccatatcaagcaaactaaaaactagggcagctatctacaaaatccattccagtaggggagcccggagcccacactccctcctgttaccataaaaaaaatctacaagatccatttcttattctgacaggagcggagcagccatgcataagacgcatgcaagcacccagcatgaggtgtaatgtaacaacataattaggacaattctattgaacaatagcgccgcttaaatattcgtacaagtagctaactacaaaaggcaaaagaattaacacgtcaagaaactaatatgcgaaattcatcactgtgcaaaccgagatgatcagcccaacgcccaaaccagcagctacaaagtgcccatcaggtgttccttcaaagctaggagattagtgtaaatacacacatttctacgaaccctaaaatagtggaacccttacgggaccaaaaattggagcccagtggcggagcatcagagcatgggcatccaacaattgttttcatgtatttttgcggagcaaaatctgggtttggttgctcggagaatggccatccatctcccagaataagcgattcttatcttaagaaagaacgcagaatcacgcagtacttggggtttccgccggcgttgcgacttgcgagagggagcggagacgccggagagggtttggggttttgctgtttcgggaacccgtacgtaccacgatgcggggaggagacggaccgccggcggcgcgatgggttcgcggcggcggccggatgggttcgcggcggcggcgcgatgggtacgcggcggcggaggagcgtcgcgtgcctagcgaagtgggcgcggcttcgaaccgaagccaactcacggccgcttcgggcgttaagtggccggacggctttctgcggaagcgcgtcgcggagaagcggcgcgagaagctacccgtttggctccagcttctgcttctggcggctagaagccgcccagaagctgaaccaaacagccactagactggccagtgtgatgtcaaaagaacatttctgtcaattgctttacttggttacttgatcttttaccactcagaacattcttgtttgtttaaaaaattagaggacaatttgccttttttcactaagaatcttgtcatgtgatagaattaataaaaatgcacacaaggatgtgggctttccttttgtgtgaaaggaatggcaggttaatgacttggtcctgtgtgtcctgttcatctgtgccatgactttgaatcttgatcgttggaatatcctgtttttttatagtaactctgttccctaagttgtttcgctgctcttaagtctaatctttccatatagccgaattgcctctctgactagcaaaatttatcgtagcctaacttgtgtcatctatgctagttattcatggttctatactagtttatttatctatatccattgtgtaccccacccgttacattttgatatttggttatcttattctcactgttccgtaaacatttggacataaggaaatgtttatgaagataatatttacgaaaaataatttatctgatccctcgagttccttatgacaggcaatattcagaggtgcgatgaaaggcaaactgatagtgtcttgcccccttcctcctgagaggataccaagattccagcttcttttcaaggatgtctgagaaaactgcagctcatcacgtgcacacaatcagctacctagcccaaggtaagtagaaaagctgaagcttctataagagaagcacaacagaggggacaatgcaggcgtgttcgtgcttcgaagaaacctaattgtgctggaaacagccattttcattctcaagactgtttgcgcaaatctctgcaataatctaatgttgtacttgtccatattgcatgtttaggtttgtatttaatcacgttcatcaaatatgacgggtatagatttcttgtttggtgttaataccttgctactagtttatattgagttttggcattttacacaaactggacctggtgtgtgtgtgtgtgtgggtgggggttggggggcgtgcccccatggcattgcatttaagaagaagcattttacacaaactacagttagataattacttgtgaacattttttagttatatgagtatttaatattagtagtcagtaaattttaatgtttggttgatgtattagttgccattggaagccttagaagtcatgatatggagtattagtagccagctgtatctcatatggaatcaactaaaattctgaatcacagggctggagaacatcttgggcagtaaaacgaataacattttaatttctaggctccctgaaatcaagaagaaaagttgtacccataggcttctgatatcctagagtgagtactggtttccgtcgacaagacaaatctggctgatgccagctgcattttgataattgcattggtggtaggacacgccgcacgcggtcttggtttattttcatcaatgccatttgcctcttacgggctagttgggaactccattttattaaggaatttctattatcctaagaaaaaatgaactaatttaccttgggaaaatagaaattctttggaaaaataggatttcccaaactagccctacataatgtgcacaggccagaacataaacactgtttcatcctgtgatcttgaaataaggcctcccttcgtgcaaaagaaagaaaaaaaattctggacctcgatgaaaaggacttgattttgttcgcatctgtgcaggatcacaggatctgagtggtgaggaaatatcaccatcttgtgtgtgtgtgtgtgtgggtgggtggatggagttcgtagctggagttgtcctgcgagattgaagcgaggtgttcctaggagccagaaggggcaccgcattggtttctgatgtacgcacactaacggtttctgaaatttgagctagtaatctgaatgaaatccaaaccgaataaccgatacagatttttgcttaccaccctaccttccgtggggaagaaatacagcagtctgtcagtcagtcaggaaaaa

SEQ ID NO: 23 - protein, 249 aa, Zea mays
MAMASSSSGLRSCSALGVPSLLAPSTSSSSRSGRLPFCAHATTSGRVTMSAEWMPGQPRPAHLDGSSPGDFGFDPLGLATVPENFERFKESEVYHCRWAMLAVPGVLVPEALGLGNWVKAQEWAAVPGGQATYLGAPVPWGTLPTILAVEFVAIAFAEHQRTMEKDPEKKKYPGGAFDPLGFSRDPAKLEEYKLKEIKNGRLAMLAFVGFCVQQSAYPGTGPLENLAAHLADPWHNNIGDIIIPRSISP

SEQ ID NO: 24 - protein, 271 aa, Zea mays
MALSSAGSFVACSLRPSGASIHAPRSPPHLKPGAAAASFTRTPQRRANATKGGVSTVCEPLGPDRPIWFPGSSPPPWLDGSLPGDFGFDPLGLGSEPELLRWFAQAELMHGRWAMLAAAGILVPDLLARWGFIDAGFSWFDAGSREYFADPWTLFVSQMALMGWAEGRRWADYLRPGCVDIEPRFPNRKNPVPDVGYPGGLWFDWANWGRGSPEPVMVLRTKEIKNGRLAMLAFVGFWFQAVYTGQGPIDNLLAHLADPGHCNIFSAFTSH

SEQ ID NO: 25 - protein, 242 aa, Zea mays
MATAVPAACLRAPCSSPAAVARRLGAGGPSLRKRHCAVAPVAAACGPAPPRLLDNEEAVCSVRRRVLVAGAAAFLSRPNPAAFAAEAKKGFLPVVDKKAGYSFLYPFGWEEVAVQGQDKVYKDVIEPLESVSVNSIPTSKEDIRDLGPPDKVAEALIKKVLAPSTQKTKLIEAKENDVDGRAYYTFEFTAQAPNYTRHALGAIVIANGKFYTLTTGANERRWEKMKDRLHTVVDSFKIENRI

SEQ ID NO: 26 - protein, 283 aa, Zea mays
MAALAPSKILGTKLNFAGSSRYATAAPTAGAQKIVSLFSKKPAQKPKPSAVSSSSPDISDELAKWYGPDRRIYLPDGLLDRSEVPEYLTGEVPGDYGYDPFGLGKKPEDFAKYQAYELIHARWAMLGAAGAVIPEACNKFGANCGPEAVWFKTGALLLDGNTLSYFGNSIPINLVVAVIAEVVLVGGAEYYRIINGLDLEDKLHPGGPFDPLGLASDPDQAAILKVKEIKNGRLAMFSMFAFFIQAYVTGEGPVENLAKHLSDPFGNNLLTVISGAAERTPSL

SEQ ID NO: 27 - protein, 424 aa, Zea mays
MAAAPSSLASSSHIPRRATATAPAQSHSPPLPQQLRPARSFKRGALAQHVRYSFAGREASRRRTPGACFVVSSSQPGLAAIDVPAATIPDATTTSVTERTSVSSLLEVVSEDLLSLNNNLKSLVGAENPVLVSAAEQIFGAGGKRLRPALVFLVSRATAELAGLSELTAEHRRLAEIIEMIHTASLIHDDVIDDSGMRRGKETIHQLYGTRVAVLAGDFMFAQSSWFLANLENIEVIKLISQVIKDFASGEIKQASTLFDCDITLDDYLLKSYYKTASLIAASTKSASIFSGVSTTICEKMYAYGRNLGLSFQVVDDILDFTQSAEQLGKPAASDLAKGNLTAPVIFALQSEPELREIIDSEFSDTDSLATAIELVHRSGGIRRAHELAREKGDLAIQNLQCLPRSDFRSALEKMVEYNLERIE

SEQ ID NO: 28 - protein, 708 aa, Zea mays
MIVQPIELRAWTAFPGSAQEGIGRMAASVSRAICVQKPGSKCTRDREATSFARRSVAAPRPPHAKAAGVIRSDSGAGRGQHCSPLRAVVDAAPIQTTKKRVFHFGKGKSEGNKTMKELLGGKGANLAEMASIGLSVPPGFTVSTEACQQYQDAGCALPAGLWAEIVDGLQWVEEYMGATLGDPQRPLLLSVRSGAAVSMPGMMDTVLNLGLNDEVAAGLAAKSGERFAYDSFRRFLDMFGNVVMDIPRSLFEEKLEHMKESKGLKNDTDLTASDLKELVGQYKEVYLSAKGEPFPSDPKKQLELAVLAVFNSWESPRAKKYRSINQITGLRGTAVNVQCMVFGNMGNTSGTGVLFTRNPNTGEKKLYGEFLVNAQGEDVVAGIRTPEDLDAMKNLMPQAYDELVENCNILESHYKEMQDIEFTVQENRLWMLQCRTGKRTGKSAVKIAVDMVNEGLVEPRSAIKMVEPGHLDQLLHPQFENPSAYKDQVIATGLPASPGAAVGQVVFTAEDAEAWHSQGKAAILVRAETSPEDVGGMHAAVGILTERGGMTSHAAVVARGWGKCCVSGCSGIRVNDAEKLVTIGGHVLREGEWLSLNGSTGEVILGKQPLSPPALSGDLGTFMAWVDDVRKLKVLANADTPDDALTARNNGAQGIGLCRTEHMFFASDERIKAVRQMIMAPTLELRQQALDRLLPYQRSWTRGEWASW

SEQ ID NO: 29 - protein, 619 aa, Zea mays
MAPVQCARSQRVFHFGKGKSEGNKTMKELLGGKGANLAEMASIGLSVPPGFTVSTEACQQYQDAGCALPAGLWAEIVDGLQWVEEYMGATLGDPQRPLLLSVRSGAAVSMPGMMDTVLNLGLNDEVAAGLAAKSGERFAYDSFRRFLDMFGNVVMDIPRSLFEEKLEHMKESKGLKNDTDLTASDLKELVGQYKEVYLSAKGEPFPSDPKKQLELAVLAVFNSWESPRAKKYRSINQITGLRGTAVNVQCMVFGNMGNTSGTGVLFTRNPNTGEKKLYGEFLVNAQGEDVVAGIRTPEDLDAMKNLMPQAYDELVENCNILESHYKEMQDIEFTVQENRLWMLQCRTGKRTGKSAVKIAVDMVNEGLVEPRSAIKMVEPGHLDQLLHPQFENPSAYKDQVIATGLPASPGAAVGQVVFTAEDAEAWHSQGKAAILVRAETSPEDVGGMHAAVGILTERGGMTSHAAVVARGWGKCCVSGCSGIRVNDAEKLVTIGGHVLREGEWLSLNGSTGEVILGKQPLSPPALSGDLGTFMAWVDDVRKLKVLANADTPDDALTARNNGAQGIGLCRTEHMFFASDERIKAVRQMIMAPTLELRQQALDRLLPYQRSWTRGEWASW

SEQ ID NO: 30 - protein, 236 aa, Zea mays
MKCRSDAPGGGDGHRDRAPAPVATGVGGSPPGERSKKQRTEEPSSSSSVVGECSSSSSQALPPPLPEQLLQDAGVGEQPPPGPEPAGGEQARVPDLGEDLVFEVLMRAEARTLAAAACVSRGWRLLARDERLWEAACVREWACTGFSEQMLRSVVLPLGGFRRLHEMYIRPVQRRAAGAPRGQQRRQLPVRMGRDQVQVSLSLLSTSFFLKMPNAPPPPPKDKDKDGDKNGGGQCG

SEQ ID NO: 31 - protein, 310 aa, Zea mays
MAGGGAGDDDVVVVSCGGRGGGDPGAYAAVLKRKLDLYCAAVAKSMEAKSQEHSLGYPNSQASDASQLISQASFDGDIDGASLVTNSNVIEDDDFQGKPTNSGTSKELSDDDGDLEENTDPANAKKMRRMVSNRESARRSRKRKQAHLTDLESQVSRLTSENASLLKRLADMTQKYKDASVDNKNLTVDVETMRRKVNIAEEAVRRLTGITLMLPTAFEKPTSSAPLSSCPSDAASASASAAIEDSVKHFLQAPLENSGIIPNAAVFQTKPASLHRVASLENLQKRIVGDAMYSETASTTFSDPEALADR

SEQ ID NO: 32 - DNA, 1331 bp, Zea mays
taatagcagcctcagattctgctcagctctcactcagacgccacctgttcttccttcctctcctctctgcaacgcgtcgggaagcagctgccagccatggcaatggcgtcgtcgtcgagcgggctgaggagctgcagcgcattgggcgtgcccagcctgctggcgccgtcgacgtcgtcgtcgtcccggtccggccgcctgccgttctgcgcccacgccaccacctccggccgcgtcaccatgtccgcggagtggatgcccgggcagccccgccccgcccacctcgacggctcctcgccagggtaagcaagctactagcctagccagtgacgacgcataacgtacaatcgtacatgtctttttctactgtgcatgcaatgatatatatatatatatacaaacacacacagtgacttcggcttcgaccccctgggcctggccacggtgccggagaacttcgagcggttcaaggagtcggaggtgtaccactgccggtgggccatgctggccgtgccgggggtgctggtgccggaggcgctggggctgggcaactgggtgaaggcgcaggagtgggcggccgtccccggcgggcaggccacgtacctgggcgccccggtgccgtggggcacgctgccgaccatcctggcggtcgagttcgtggccatcgccttcgccgagcaccagcgcaccatggagaaggaccccgagaagaagaagtaccccggcggcgccttcgacccgctcggcttctccagggaccccgccaagctcgaggagtacaagctcaaggagatcaagaacggccgcctcgccatgctggccttcgtcggcttctgcgtccagcagtcggcgtacccgggcaccggtccgctcgagaaccttgccgcccacctcgccgacccctggcacaacaacatcggagacatcatcatccctagatcgatctccccttgacaattatattggttgattattacgactaggcactaggcactgcctgcctgcgtgcaggagcagtacaacgacgacgacggcgagtcggcgacttccctcccgcccggaaagctctcgtaatctaaaggaaaaggaaattggtaccatgttgtgcacttctagcatgcatgacagcaatcgcaagcttcttcctcagccactaacctctatgtacattttcagcgcaagatcattgtcgacagtagtatacataaaagtgtacacaatatactgaacaaacaaccaagacacaagtgaatgtaatttggcaaagtacagtaagatccatgcataaacaaacaccatatggcatgtcttaccttgacaagatctcccag

SEQ ID NO: 33 - DNA, 2413 bp, Zea mays
ctccctatcctgaaacgccaatccgataaaaagcgcgcaccggcgtggcgcgcttcgcccccaggagccccgatcatctcccgctcccttccttcctcctcctcctcctcatggctctgtcgtccgccggctcgttcgtggcctgcagcctccggccaaggtaagcacaaaaggcatggcgcaccctgcaccgccagtccgccacaccatgagcgtctctttctcacacgccgccgctgtgcgctccgtttctgcagcggagctagcatccatgccccgaggtcgccgccgcacctgaagccgggtgctgcggcggcgtcgttcacgaggacgccgcagcgccgggcgaacgcgaccaagggcggcgtgtccaccgtgtgcgagccgctgggccccgacaggccgatctggttccccggcagctcccctccgccgtggctcgacggaaggtaagtaagtgatgttagcagggtgggcatagaagagtctctcagatgtacgtaccggaggataagatggccagctgacatttctttgccatcgaattattgccctgcagccttccaggagactttggatttgaccctctcggactaggtgatcgacaccgtatttttttttcttcctccatgcaaaacaactagtagtagcgctgacgaacttaattagtgcaggttcggagccggagctgctgcggtggttcgcgcaggcggagctgatgcacgggcggtgggcgatgctggcggcggcgggcatcctggtcccggacctgctggcgcggtggggcttcatcgacgcggggttctcgtggttcgacgccgggtcccgcgagtacttcgcggacccctggacgctgttcgtgtcgcagatggcgctgatggggtgggcggaggggcggcggtgggcggactacctgaggcccgggtgcgtggacatcgagccgcgcttcccgaaccgcaagaacccggtgcccgacgtggggtaccccggggggctgtggttcgactgggccaactggggccgcgggtccccggagcccgtgatggtgctgcgcaccaaggagatcaagaacgggcggctcgccatgctcgccttcgtcggcttctggttccaggccgtgtacacgggccagggccccatcgacaacctgctcgcgcacctcgccgaccccggccactgcaacatcttctcggtacgtgcaccgccggcggaacggcctcttgtcttgcggccttgcttcgttatatataggcaccgtttgaacgttgggtctgctggttgcttttctcaggcgttcacgtcccactgatccgatcttgcttcggagctggcggagagactgcgaaggattaaaaaaaagggcatcctgttgagggagaaagaacttcgcttggtcggtatcattttggccttgctggacatgtcaacattttgtttgtagtacctgcgtagaaatgtcaaaccacctgtacaaacgtacaaataccaccccagggatcgcgatgatgctagccagcagtccagcacacactagcttgtcctgaagatccatgcaacaccgtatacagaggaaatttatggacacggcaatgtaaacatcccccatatcctcgtcgtagcataacggtgtcatctacaatacaaatcctttatttattttacacgatatactgcggacaacattagcggtgttaaggtgattgggttgctaaaattagagggtgttgcttgaggattaaagctagtttgggagtcaaaaaaaccgaagcagatatgagggactagaatctacacattcaattttgtacatgcagccagtaaacaggagtattgacgacagtggacttgttccgttgttcgtagtatcgatgacgtcgattcctagctagcaaccaatctccgtgtggacaagtcacaagtggacactgaggctatccgcaaccgttacccctaaatttttccccctatatcactttttccccctatttttccctctattttttcatctcccgcagcggttccccctaaatactccccctataccccactaccactataaaatatcattttctataccaactgttgaatgcaattttgttgctgatgcagggacgtctgtagccaaaagtttaatacgcatctgcaggagaaagaaaagaaagaaaaagaaattatcatccagagaatacgtgggaaataagcaggaatacataaccaagatatttgccaggccatcatgcaaatccttggagttggcggccacaaagataggagtttgttgtaatcttttcctattatttagaataagttagttttatatccagttagagacgggatatataagcactattgtaagctgcaaagacgagagatcaacagttatcattttctttaatctactacatattccttt

SEQ ID NO: 34 - DNA, 2312 bp, Zea mays
agtttccaaactcgcgcatccggtcggctggcgcgtcgtgtggaccagaaagggagcgaaatcctactcgtcgcacggggtccgcaagcttttcgtcgcctcgattcgcttccgccccatcctccttcccgacgcctcacatggcaacggccgtgcccgccgcctgcctccgcgcgccgtgctcctctccagcggccgtcgcacgccgacttggggccggtggcccgtcgctgcgcaagcggcattgcgccgtcgcgcccgtcgctgccgcctgcggccccgcgccgccgcggctgcttgacaacggttggtacccccgccgccgcttctcctgagcaggattgcgtctccctccctccctcccctttgcacctctatggcgtctcgctttaccgacgttgctgtgtgccctgcctgacgcagaggaggcggtctgctccgtacggcggcgtgtgctggttgccggtgccgccgcgttcctctcccggcctaatccggcggcatgtgagtaatttacctcttcgctttatgcagcgttgctggcgctttgatgtgcactggccgctcagtgtcagtgggagacgagcttgcagtgtgaatggtttatttggtcaaaactgcgcctctgagtgcgcttctgatctggtatagtcgcagcagaggctaagaaagggttcctgcccgtcgtcgacaagaaggctggctactctttcctctacccgttcggatgggaggtgacaactgacaaacacttcttgtattaccgtgctcggttgattgaagagactggctgcgcgatgtattttatcttgacgtgtgtgaggctgaccacgttatcctatccaggaagtggctgtgcaagggcaagacaaggtgtacaaagatgtgatagagcctctcgagagtgtgagcgtcaactctattccaactagcaaggaggatatccgtgatcttggtcctccggataaggtttactattctcttttccataaataaacttggatagtccataggtatctagtggaaaaaggtccaattttgatgttttaactcctgtttgtcaggttgccgaggctctgattaaaaaggttttggcaccatcaacacagaagacaaagttaattgaggcgaaagaggtgtgccttccgtccaattttccatgcttggcctaactattcctgttaatattcatggacaccagtgcgtgtcaaatctttgaggatcggggaatgatgatttgtgacatagcatggttctttaaataagttcattcacgcatgccgattggtttacgtggacagaattataaaagacggaatgagcttagttggtgctgattgacgaatctctctgagtccattttatttaggttgagcagtaagctgaacagctactctctgaaaatagcaaatgtactaatgaatggtttccacctacaacatgtattgaaatttgttgcctggtttccaagtttcagctggtatgctgagctaataaaagattacgtagccagttaccaacttgaaagtacaggcggcaatatgacagataaaacatatagataccaccataaattagctagtagttctcccatttgtatattagaatcagtttttgttatttgcagaacatcatgttcttcaaattggccatgctattctgttcttgaaagatatattttggtacttatgttgctaaaattacaagatgtgttttctgatgcagaatgatgttgatgggagggcttactacacttttgagttcacagctcaggctccaaactacaccagacatgcacttggtgctattgtaattgcaaatggtatgatctgccacccgtgatcgtctccgtcagtaagatgtgatatattgtactaccctggaccttgtggtaactggaaaaactgtccaaatgccgtcactggtcactgccatctaatgttttctactaattgtgagtgggatgctgcaggcaaattttacacattgaccactggagcaaacgagaggaggtgggaaaagatgaaggataggctgcatactgttgtggattccttcaaaatcgaaaatagaatatgagtgcctgaattgctgtgttgtttttccttcgttgattcgctttttcttacataactgcagtgctgagatttttcagtagtaaataccgggattgtggattatgctgatcagtttcatttcgaaatgtttgttaccagacttgagcaacatttgtttgtactttatgtgtataataataatatcttgtttggatgtagatattggagcataaaattgggaattagaatcaatgt

SEQ ID NO: 35 - DNA, 2481 bp, Zea mays
agtgcacaagaggcccctcaagctgccacatcagcaccctcatctgccaagtcagcacagcctgcccaatcgcctccaggcaacagatagccctgatgggcacccatccaatggcagctccgatggccaaatctctgctaggcccacagcatcctccgatcctcattttcatccatttaaactagctcgccttttcctccacaagcccccatcagccatcccctcccgcggcaagtctctctgaattgtgggtctccggcgatggcggctcttgctccatccaagattctgggcaccaagctcaacttcgccggctcctcccgctacgccaccgcagcgcccaccgcgggggctcagaagatcgtctccctcttcagcaagaagcctgcccagaagcccaagccctctgcggtgtcgtcctcttctccggacatcagcgacgagctcgccaagtggtacggtgagtagacctggccccaactgctggcagcgcacgacttctaggacccagatttgcttcagggctcccttgtgttgggcgtttgatagaactttggcatgaaaatcttcagaagcttcctctgcactaattgtatcttgtttggtgtttcatgtttgagatatagaactttgcccatgaaaaccttcagaagctccctgtatagtaactgtctcctgttctatgtccaattaggtcctgacaggaggatctacctgccggatgggctcttggaccgctcggaggtaccggagtacctcaccggagaggtccctggagagtaagtcacatcactccaactttgccttccataaaggtttttgcttgtttcagaaattctagattccagttggtagtttaatgaaatcaggttagcgctacaagatagtttaaacaacggtaccaatttcatcgaccaaaacaaaaaaaaagtttttttttcttggaaaaaaatagtttgtggtcaaaatccgatttttcaccaaagtggtgcttcattgcagcttgtagaattcgttctgaaagcacacacgtctctcaaccagcatttgaaataatcttcgtcagttttaaacaacaatctacggccgtcatttcctctagttttgttcatatatgaaaaactgcagagaatcgaagttaaggtatctgaactgaactatcttgctcctacaactggcagctatggctacgacccttttggcctgggcaagaagccagaggacttcgccaagtgagtctcacatcgatcacggtctcaaacatacaatttcacatcatcaccaaacttatcctactaccatcaacgccgtgcaggtaccaggcctacgagctgatccatgccagatgggccatgctcggtgccgctggcgctgtcatcccagaggcgtgcaacaagttcggcgctaactgcggccccgaggccgtctggttcaaggtcctgcatgtcatcccagatctcagaatcacatagtacttcaatagcatttcattttaacaaattaaggttttacatgttagttgctagatgcaaagtatcaatatctgactctgagagtttgaactcaaagttcacggatggtgtctgtcacctgaatgcatgcagaccggagccctgctcctcgacggaaacaccctcagctatttcggcaacagcatccccatcaacctggtggtcgccgtgatcgcggaggtcgtcctcgtcggcggcgccgagtactaccggatcatcaacggactggacctcgaggacaagctgcaccccggtggccccttcgaccccctgggcttggccagcgaccccgaccaggccgccatcctcaaggtgaaggagatcaagaacggccggctcgccatgttctccatgttcgccttcttcatccaggcctacgtcaccggcgaaggccccgtcgagaacctcgccaagcacctcagcgaccccttcggcaacaacctgctcaccgtcatctccggcgccgccgagaggacgcccagcctgtgaggacgcgccacaagccggcagcgatgccaagtcatgcgctgctgccgtccttgattttaccggggaaagagctgtgtgtgagggtctgaagtgaagaacgtgccatgcccatgcgtgtacattatcgagagggggaagaaaccttctcattctgatctctgatatgactgctgcttcagattgcgcctgagatatgctaagtttttgaaagctaattagttcgtgcacattaagggtgcgtttgagttggattatttgtgaatgctagcttattttaacttatttgtgattttaaagtgatattttacccctctagtataattcaacgtataggaggaaacaaacgtagcctaagttactttgtggtcaatctaatagagctcctgaattttacttcttaattctccaaaggagtgtttccagagacaagaattaatcgtgaaatgttttatactcagaaaatagtggcttgatttttttt

SEQ ID NO: 36 - DNA, 4161 bp, Zea mays
agccaggcacggctccagcaacgacacccgagtacggagtacccgacccgcctgcctgcctcctgcctgcctgtggtcgcctgtatcacaagctcccaaaaccgccgcgcacgctgccaccaccggtacccaacgaacatggcggcggcgccgtcctccctcgcctcctcgtcgcatatcccccgccgcgccacagccacggccccagcacagtcgcactcgcctccgttgccgcagcagctccgccccgccaggtccttcaaacgcggggcgctcgcgcagcacgtccggtacagctttgccggcagggaggcatcgaggcggcgcacaccaggtgcttgcttcgtggtctcatccagccagccaggttccttgtcacttcagttggtactatataagctttgcgtacttctagcagtgcgggagtgttagtggccggctgagtctgggactttgggtctgtgactgtgtaggccttgctgccatcgatgtgccggcagcgactattcctgatgccacgacgacaagcgtcactgagcggacttcggtttcatctcttttagaggttgtatcggaggacttgctcagccttaacaacaatctgaaatcggtaagcttcttggcttctctgctgaaaggctgcgggtttccgttcagttgactcttataactcctccgggaaaagatcattccttctcgcagtatttatatcagtatatgtatggccaagtaccttttcttttgcgtgtgtgcacgtgcatttgatacaaagctgataactgaaatgagtaatgccagttatcaaaatgctcactttcaaaggatcattgtgcttgcagttctatcaaacttctggtcgtggttatctaaagatcacattcagctgcaacaaatgttatttctgcgttttgttactacttgtgtagtaaaaaaaaagttcttcaagtccctcgacccagcactattcatatggagttaggctgtctccagcaaatcacgtatatagtcagacaaaacactgtttttacgctttatattgcactgtttacatagtgcgatgtgataggatggataaactgctggaaataaccttagaacagacattatcaaccataacaccttctaaggcaagattttacaggggattgaaaccaatgttgtgaacattctgcaggtgtactatagagaatgcagaggaacaatcatgcagttatagccttatagggatcacaggcctctccctgtttaaaaaaatactgccctttatattacagaaaatcaccttgttgtttgttcaattctcaatggcgatgtgtgcagccaaattctctcggttaagggttaaaagaagcagttggagagttcattactcaataaagaaagaagagaacgtaactgctggtggttttgtttttgtttttgtttactgtgcaagggataagagtcagatgttggatgaactgataatcatataaagttatatgctttcatgttcttttagatatgtgacttgtgagcaaccttttactgcttgattgggttcttttagacaagctccaaatggaagttaacatcattcatttcaggaataagtgtcattcaggggtttactgcagagtggatgggaatcattacaagatgactaaaaattacatcaatagatgcttaccaaagcttccatttaaaaacattctatatttgttaatgtgtcggcaaataggcaaatgggatgcaaggttgtgcttgttgacaactttttggatccttgacttcttccactgttgtagtgtttgtattaagtaagacatcaaactccagggatatttatcattataaaaaaatacatcatcatatgcataggggaaactgtactttttattgctaggatacctatctgccacagtaacaactaacataactgcaatagcttgttggtgcagaaaatccagttttggtttctgcagctgaacaaatttttggtgctggtggaaaaagattaaggccagcattggttttcctggtgtctagagcaactgctgaattagctggtttgtcgtaagttctcttagttattctgaccttaccatttctaagggaatatattgaaatacttgacttcaattatttttattctgttgcaatttagggagttaactgcagaacatcgacggttggcagagataatcgagatgattcacactgcgagtttaatacatgatgatgtcatagatgatagtgggatgagaagaggtacatgatgatataatgctattatctaatatgccaaaagtactatcaataaaaccatgtcattttgggaatagatgaatgttatattcttcttagaaacatttctagctatagaaacatggattactacgaaagggcctctatctgagttggttatacggtccgagtagtacttctcatgtcctaagtttacccctttgtaggagtgaatttcagactgggggttaaaaaatcccctcgtctgagaaatattctcttaatacaatactaggggttgtcttacccctgtaggtcgagtttttagaaacatggattatttgctgcactctttttcaagtgctctttagggaacatttgattattgtaataacataatataagtagcacagttccgttttcgttttccttcttttctgaaaattggccagtaacttttaaattgattgagatagagatgagcattcacttcggttctaagtgttgggcctaaagcaggcagaggttaaccaggcatcccaccatcacaataggatattgcttgttttgaatgtaaggccactctcgtttttttcacacgggagagtggggggtgggggtggggggctggatctcacaacttgaccagtttattctaatgtagagctaactgtttcagggaaggaaactattcaccaactatatggtacacgtgtggctgtacttgctggtgattttatgtttgcacaatcttcttggtttcttgcaaacctagaaaatattgaagttataaaattgatcagtcaggtaatccaggacttgaggaaaacacttatgttctgtttaagacagtgctacttgattttcttaacagaaatgaaattggctctaacaggtcatcaaggactttgcaagcggcgagataaaacaagcttccactctttttgattgtgacatcacacttgacgactaccttctcaagagctactacaagactgcatctttgattgcagccagcacaaaatcagcttccatattcagtggcgtcagcaccactatttgtgaaaaaatgtatgcatatggcaggaatcttggtctatccttccaggttgtcgatgacatcctggatttcacccagtcagccgaacaacttggcaaaccagcagcaagtgacttggcaaagggaaacctgactgctccagtcatcttcgctttgcaaagtgaaccagagctaagggagatcattgattctgagttcagtgacacggattcgttagctactgcaatagagctcgttcatagaagtggtgggatacggagggcacatgagcttgcaagagagaagggtgacttggcaatccaaaatctgcagtgccttccaagaagtgacttcagaagtgcccttgagaagatggtggaatacaatcttgagaggattgagtagtggattttacttgaatgctccatcaggtacatatctccatttggggtttggggtagttctcatatagatctttatattcagcccctttgggaagatacatttcactgaaaaatcagatgaatcacactatttcatacaaattctggggatagcctttgagcaggccactactatcaagttgattttgtaacagcttgtgcagaatcataagaaaccctaggacttgaccgcagccccttgcgcctacatgtatccgagcattctacttggcagttcttgtaaataatagaaccatacagtaacttagcattcttttttgttttgcaatctgagcatgcttacaagcaacaaagtgtgtgctatatttgtacggatctacgtgcacctaacatcatgcacttgtacaattgctttgcactattatgtactatttccgatttaacagtaatacggatttaacagtaataataccgttcattttctacataaga

SEQ ID NO: 37 - DNA, 10562 bp, Zea mays
acccgttcgcctctcaccttttcgctgtactcactcgccacacacaccccctctccagctccgttggagctccggacagcagcaggcgcggggcggtcacgtagtaagcagctctcggctccctctccccttgctccatatgatcgtgcaacccatcgagctacgcgcgtggactgccttccctgggtcggcgcaggaggggatcggaaggatggcggcgtcggtttccagggccatctgcgttcagaagccgggctcaaaatgcaccagggacagggaagcgacctccttcgcccgccgatcggtcgcagcgccgaggcccccgcacgccaaagccgccggcgtcatccgctccgactccggcgcgggacggggccagcattgctcgccgctgagggccgtcgttgacgccgcgccgatacagacgaccaaaaaggtatcccttgcagctcttagaaactgaattcgcgaggcagccagccaatatagccgagagagcattttttgattggccggatacatgtatgttgctgtgactgctgagatgaaaattaacggacaggaaacacataaataaagacaaaaaaaagtcaaaaaaaaccccgaagtatacatgtatatataaagtcactcagtaatatacacataaaaaccggtctaatccgcatgtcgtgcgttaacgtattataatatacgtaatatttggtgattaatagatatattaatataacacaagtacacagaattacgtatagattacgtatatcatgaatatgattccgcaaatacgaaaggagttctcacaaatacagaacacaggacaggatacacacgccaccacacataagttgatcccgccgtcgagcgcgagctcatgtcttcccaccaaggcgtgtcaaggtgtcctcgcaagcgtggagatgaacaagtgttttctgaaatgctcatgtccgagctcaccaccatatggacagttccaacccgacgagcaaggtggtgtctccacgaccgacgctgcccgtaccaccaacgtttgcgttacaacacctgtggtccttgtgaccaccttcgcttaaatttaaacctaattatgaaaatcatttacgcagaggacatcgagaatagtagtagtagaagtaagaattcccaaacaagttcttgtttttgttcaaaacattcaaattttcataagaataagtccttcctttttttactccaaacttgggaagtgggactaactagactagagcatttcgggcttggcaggcaattgatatggcccgaaaagacccataaggtaggcccattcaagctattggaggtgtttgggtaaggaaaacgggcatcagacaaattaggcccatcccatgaatgcatagcccagcccaaacctggttcaaatagagggctcaatcatatcaaatgtgaagtgaggtttttttctctcgacgcaagagcatctccaataattatcataaaaagtagtgaattaataacttccctcaatacctaaaagtagacatatcggatcagatcaatatcggaccttgggttatttggtacgactcgcgcccgattcgtgtctagtatcgggccaggttacctgtgtttcttggttggatgtgttgggtcggtttttcgataaaaatcatggcccgcgtctgacacgtggattatagcgggtcaaaatctatagcccttgcccgcccgttgtattagtcagatcgggtcaggttggttgggtcgagtgacacatgctcatatctacctcctaaataatagaagatggttgtgcattaataattctggactattttcaaatataccctgatcacttgcaatatttttttattgggttagacctgaggtattaattgattgtggacgttagtggacttgggtttagggttgcatcaatacataatatctctttggaacatgtaaatataatcctttttttcaaaagaaaaaaaagttgatcctgctggccggtgatcgatattatcttgtcttcaatcaaatcaaaactgccgaagcgttagttccatgccttgaaacctttattactataacaagacaaactgccgcacgactatcaatacagagtgacgccgtctattttgtagcgatactaattactactaccctatatatgtaagattttaagaaccagacaaactggtgtgcagagagcagtccatgcccatggttttcgccaaaaaccagtcgagcacagtgctactgctaccagcctatcacgctacaaccacgcaactgctctggtcacgtaaaaggattttcccgtggctcggtacatccgcacacgtacgtcgagaatgtgaacggaatcgagcatggaatccacgcacggatagacaggccgcgcgtcaggtgcaccttggcaacctagctagcaacttgattattacggtaggatcgctcggcggccatccggcaagtggccgacgcagctagaaaacaagcatcgaaagtaccttttcttttttccaatgcggctaaatccaagaaatcacggggactttttgtccagcaaaaggttcgcttcacttggcacacaatcgagtggctagctagggacatgttatacggtgccgcatttttattttctttggccgttggttccaatggcatcgtcacttcccccacaaattctaccgacaataatcaggggtaaaaatgctggcttcaaatagtagcagccatttagtaattaattactagcaacagtggtggcaggcggcagacatgctcgtatcaattttctacgcttgtcttgtctcaataatgtccagtgtttgtctcccaagacttgcgtgtttcaactggggatcctaaggtcatggcctcatatgcatataggatcacactacaagagccttttatgactttatatcgttcaattaataattttaatataaataaagatattagtaataaaaaaattactcctcaacactttctactaacatcctctaatttaaatttctcactagccaaagacagagagtaggagtgactctctagagagtgtgctgtgcgcataagatatgaaaaatctattaaattgtgaaaaggacaatagagcgatttttatccaaatagtttttaaaacaatggttccgaaagttagtttaagagtggatcttagagatgttgtagattatcataatgttgacacatgttcaaaggcatacaccattatgaatgttaaattctgcaaactttagatacacaaaaggtggcctttttaaagacacaacatgagaccctaaatttatgatatgactgattttaaagatatatcattgtatgatgtcgtctgtttgctatctcctgtactagaaaaaaccgggctagctagaggctcagggttgtatatccacaatctagtttatccaccattaataagatagaatttgttatggtgtggcaatgcatttccaacgacgttctgcatatagttttacttcctaaggtagcggataatgtttaaaaacgcaattttgtcaaccaggattaggaagctcattatgagtttgcctccatttggttagaacatggaacacgttctgcatatagtttttctctgggtaagattgcgtagcgatcaggttttcggatcttccactccgttttcccgtcgtcatacgtaggcgtagcggtccacctcattcacttgtagttgtagctaggaagctctctcccaacggcgtgccgcatacgtacgtacaaaaatggcatgaatttgctccaccgtgtttacatatataggagaacttggataaatcccaatcccaaaaagtttataaccataattgtaaatactgcaacacatggatatgggcactgtagttcacccctaccttataagcaccaagctgcggcagagcggctcggagtgcgtgcaaaaaaagacagccatccgtgcgctctccttgtggcttctgcaggctgcagcagctgccacccgcccgcggccccgcgccacatggacgcacggtggacggtgctctgcctctcccgggaacgccgtgaccgggtactagctagcttgaacgggataccaggcggagacggacggccgcgcgcccgcggatttgcggaagcgtgcgtgtcgccggccgtgctgcgatctatcccatcgtctaacaggcgacccatccagctgacgcgacgaattaacaacgctatccgcgcgcatgcatggccatgacttggctattttgcactgtgcaaatgtctgcccagtagttcatctcacgaacacaaatgccggtggtcagtaggagagagaagaactaactccagcgtccgatcgggacgccactcgctcgctcacaagcaagacacactagctagtctcatgctctcaactacaacaacgctagtaaagcctaaaacacacacacgcacgcacacacaagcaaagcgagcaacgtacgttcgtcagtgcgtccttgtgaaacagaaagcgcgcgctatatagctatagctgcaccgtgtctgcatgcgtgctgacacggcagtgtgagtcacacagaagcggcgcttggacgctagcaacacgatcagttcagtttttcagcgtttcttttttttctggctggatatgcatcacgcatggaacaagagggtgtgacatgcacggccagtggtggtcgttcttgcattgcatttgggatctgtatgatttaagatggagggagtactagcacaagtgtagttggcaggctatttaccgatgatcaatttttattaccaggtactctatcaaacaagtagtagctctactgtttaattaatctaacaaagtgtgtagttggcacgtagggaagcaagcccgtacgtgttgatctgaggtggccgcgggcgtccggatatgtatgctgctaccggccagttagctggggcatgcgtgtgttcacttgcttgagaccgtttctaactttgcaaacaaaaaaaacaaccagcaccagactacgtgacgtgtaaagctcatccggactgtttattgctgcctgtttgtgaagaaagaaagaaaaaaagagagagtcggccgggctgctgcacacgcacatcactcgcggccgccgctgctataaatagagcccggggcaggccctgcttaattcatcaccagccacggctgcatttatttgtcactgatcgttgttcagcctagctagctagcgctgtttccctgtgctaatggcgcccgttcaatgtgcgcgttcgcagagggtgttccacttcggcaagggcaagagcgagggcaacaagaccatgaaggaactggtgagaggtttcttctttctgtattctcgcttaatctgcatgcatgcatgcatacatactcctactaatgaagtaataacgatgctgtcgatgaatgatgacgcatgcagctgggcggcaagggcgcgaacctggcggagatggcgagcatcgggctgtcggtgccgccggggttcacggtgtcgacggaggcgtgccagcagtaccaggacgccgggtgcgccctccccgcgggcctctgggccgagatcgtcgacggcctgcagtgggtggaggagtacatgggcgccaccctgggcgatccgcagcgcccgctcctgctctccgtccgctccggcgccgccgtgtccatgcccggcatgatggacacggtgctcaacctggggctcaacgacgaagtggccgccgggctggcggccaagagcggggagcgcttcgcctacgactccttccgccgcttcctcgacatgttcggcaacgtcgtgagtacccccgcctagagatggccaaacgggccggcccggcccgggcccggtgaagcccggccaaaaccgggccgggcctgctgagccagcgggcttaattttctgtccaagcccggcccgcagcgggcttaaacgggccgggccggcccgtttagcacgaaaaaacgggccgaaaagcgggctaaacgggccggtaagcacgttttagtgtaaaaaaacgggtttaacgggcttagaggtaaacgggccgtgccgggctagcccgtcgtgcctagtttcctgtccaagcccgcccgcttattctaccgtgccgggctcggaccagacccaaaaagcgggcttcgtgccgggctcacgggcctcgtgctttttgtccatctatacccccgcccgtagctagctgcttcgattccgcgccctgactcagctcctcgcttccattcccgtccgccggttgttgttactgctagcttgtcccactagctaggtgcagtaggtgcctagttttgcgcgcatcgcgtcgcgtcgacgacgacccatcctccaccgcgctgccgtggccgcaaccaaggctggatggagcttttgtctgtttgccaggccagccgttgctttgggttaaaagtgcaaaaaaaaatgatgaaggtcacgctacgaactaaacagaccatatacgtacggcatcggcatgtaaacttggcttgtcggactcgagaaacgaaagaacgatgactcaaactgctctcagattttgtttcattgtttgtgtttaccaggtcatggacatcccccgctcactgttcgaagagaagcttgagcacatgaaggaatccaaggggctgaagaacgacaccgacctcacggcctctgacctcaaagagctcgtgggtcagtacaaggaggtctacctctcagccaagggagagccattcccctcaggtacataccggcccgtcgatcgatcgtcctcagctctactgatcgatggagctagcggtagctttccctgtgcaccgaaatcatgtgcttgcctgccttgcagaccccaagaagcagctggagctggcagtgctggctgtgttcaactcgtgggagagccccagggccaagaagtacaggagcatcaaccagatcactggcctcaggggcaccgccgtgaacgtgcagtgcatggtgttcggcaacatggggaacacttctggcaccggcgtgctcttcaccaggaaccccaacaccggagagaagaagctgtatggcgagttcctggtgaacgctcaggtatgagtcggcctcaggcttccattgcgcgcctgttcgtgcatggatacacttacgtacgttacttgacgccatgcatgcaacaattcgtttcctgctcagggtgaggatgtggttgccggaataagaaccccagaggaccttgacgccatgaagaacctcatgccacaggcctacgacgagcttgttgagaactgcaacatcctggagagccactataaggaaatgcaggtacagtttaaattttcaccttctaatttaaacaccacaccaccgtctctctctctctctctctctctctggatcctgatgtttcttctccagatgatgtgagctcaggctgagacttggtttttctttggcgtgtgtgatcatgcaggatatcgagttcactgtccaggaaaacaggctgtggatgttgcagtgcaggacagggaaacgtacgggcaaaagtgccgtgaagatcgccgtggacatggttaacgagggccttgttgagccccgctcagcgatcaagatggtagagccaggccacctggaccagcttctccatcctcaggtaatctattatcgatcaagaaccatggacgtacgtactaagggcttaccaaatcaatccctactaatgccgccgttatggaaacccacagtttgagaacccgtcggcgtacaaggatcaagtcattgccactggtctgccagcctcacctggggctgctgtgggccaggttgtgttcactgctgaggatgctgaagcatggcattcccaagggaaagctgctattctggtaatattcatcgcaaattaaacacttccatttggactgcttttgcatacaacatttttgtaaatatatatatatatactgtatgtaggtaagggcggagaccagccctgaggacgttggtggcatgcacgctgctgtggggattcttacagagaggggtggcatgacttcccacgctgctgtggtcgcacgtgggtgggggaaatgctgcgtctcgggatgctcaggcattcgcgtaaacgatgcggagaaggtgaatttaaatcctctgttacgcaggaagctccagcatgtctcgtgatttaccttgctgtttatttatatgaattagctcgtgacgatcggaggccatgtgctgcgcgaaggtgagtggctgtcgctgaatgggtcgactggtgaggtgatccttgggaagcagccgctttccccaccagcccttagtggtgatctgggaactttcatggcctgggtggatgatgttagaaagctcaaggtaaaaatcccagacatattccaaactttcttttttcaagttcaaacaagtttccatcggcaatgactaaataattatttgtgcatatgttcttctaggtcctggctaacgccgatacccctgatgatgcattgactgcgcgaaacaatggggcacaaggaattggattatgccggacagagcacatggtacgtccgatccgacatagtttagcaggctagggatacttggacattttactcttcctttagtttctttgtcctagacaagaaaaacagtttcatgtttttttctcccccctgtacttggggcagttctttgcttcagacgagaggattaaggctgtcaggcagatgattatggctcccacgcttgagctgaggcagcaggcgctcgaccgtctcttgccgtatcagaggtctgacttcgaaggcattttccgtgctatggatggtaagtgaaaaaccacaatgcatacatgttacatgcaggactgcatggcctgaacattctcttggtatcttgcgtttcaggactcccggtgaccatccgactcctggaccctcccctccacgagttccttccagaagggaacatcgaggacattgtaagtgaattatgtgctgagacgggagccaaccaggaggatgccctcgcgcgaattgaaaagctttcagaagtaaacccgatgcttggcttccgtgggtgcaggttggaattctgctactatattcacagcaaaaaaaagaaaaaaaatcactggtgatgcctgattgactaattttggaactgccgaaatttccaggcttggtatatcgtaccctgaattgacagagatgcaagcccgggccatttttgaagctgctatagcaatgaccaaccagggtgttcaagtgttcccagagataatggttcctcttgttggaacaccacaggcatgtgtctttttactttttatatatcaatgtatgtacacatactgtctctacagttcaaaaaaagtgaccaaatccatttgatgccaaaaccgcacaaacaaacagctaattataatagctgacgtttggtatttccaggaactggggcatcaagtgactcttatccgccaagttgctgagaaagtgttcgccaatgtgggcaagactatcgggtacaaagttggaacaatgattgagatccccagggcagctctggtggctgatgaggtagggaaaaccaccaagttcagaatcgcccagaactttgcgaacaagtttgtttatctgtgcattcctacgctggtctgaaatctgtggctgttgttgttgtttttttggtttcgtcaacctggcagatagcggagcaggctgaattcttctccttcggaacgaacgacctgacgcagatgacctttgggtacagcagggatgatgtgggaaagttcattcccgtctatcttgctcagggcatcctccaacatgaccccttcgaggtaactgttgcaactctgcctgccaccctcgcatgtcgcatctgatgtgactgagcatctcatgtcgcgatcacctttcttttggttgcccgtaaacctaccaggtcctggaccagaggggagtgggcgagctggtgaagtttgctacagagaggggccgcaaagctaggcctaacttgaaggttggttttgggacactgcttcgtacgtctccttactccttagaaaaccacggtttgattgttgtttggtgttggtgtgcaaacaggtgggcatttgtggagaacacggtggagagccttcgtctgtggccttcttcgcgaaggctgggctggattacgtttcttgctcccctttcaggtcggttgagtcactgataaactcgtgatcgaatatccaataagcgtatcctcttatgttaacggtagcaaaaatgttcactgttttctttgaatgctttctgcagggttccgattgctaggctagctgcagctcaggtgcttgtctgaggctgcctcctcgttggcaaccggattgcctgctgctggtggatgtggtgatcaacagtattattacagagccatgctatgtgaacattactagtagcagtgctcataaaagctacaatcccatctcccttttttttccagtcatgtaaaacttccaaactgctccatggttcaaaactctgttcttcaatacatcatcaattatcgattatatacgtggca

SEQ ID NO: 38 - DNA, 1422 bp, Zea mays
gataaatagtgtataaattaaagtataattatttatcttaaatttaccgttattctgtttattttgcaaataacaccctaaaagcgtgataatctgcactgcttatcgcaggtccatccacaaatctctccagggaccaggggaacggttgtcccgaatcgccggccatgaagtgccgctctgatgcaccaggcggtggtgacggccaccgggaccgggccccagcccccgttgccacaggcgtcggcggctcgcccccgggcgagcggagtaagaagcagcggacggaggagccgtcctcaagctccagcgtggttggcgagtgctcgtcttcgtcctcgcaggctctgccgccaccgctgccggagcagttgctgcaggacgcaggagtgggcgagcagccgcctccaggccccgagcccgcagggggcgagcaggcgagggtgccggatctcggggaggacctggtgttcgaggtgctgatgcgagcggaggcccggacactggcggccgcggcgtgcgtgagccgcgggtggcggctgctggcgagggacgagcggttgtgggaggcggcgtgcgtgcgggagtgggcctgcactggattctccgagcagatgcttcgcagtgtcgtgcttccgcttggcggcttccggcgcctacacgagatgtacatccgtccggtccagcggcgtgctgctggagcgccgcgcgggcagcagaggcggcagttgccggtgaggatgggccgggatcaggtccaagtctcactgtctttgctctcgacctcattcttcctgaagatgcctaatgctcctccacctcctcctaaggacaaggataaagatggagataagaatggaggtggccagtgtgggtgatcactgatcaagtttgtgaaaaataggagcttacctctcatgcagcatcaccacagctgcttatgttatgtaggtgattatgttgtggttcttcactgtatttgtggcagtaaagaggtgatcaagtcatttggattggtgggcagagaagactattcagataggtgcggatgtactgatcgggaggcaaataaggtgagcgagattggatggaattcattgcaatagcgtattggatgactaccaagtctgtgtgttgtacctaaattacacacgaaatgggctcatctgtaaagtttccatgccatatatgtgaatatgcgaggtgccaagagagatgcagcatgctctttgtgctgttgtgccatgggaataagggtgagcctcttagggcttcatcatgctctttgtgctgttgtgccatgagagtaagtgtgagtctcttagggcttgtttagttgtatggggattaaaggggattgagggacatacaattccttgctagttaattttggagggggattgagaggcatacaattcctta

SEQ ID NO: 39 - DNA, 4889 bp, Zea mays
aacagtgtcgccactcgccacagagcgctccatcaacacgaccgccggtataaacgcagcccccctccggcctccaccaaggccaacattgctcaggctgctcccaactcccatcctccccctcccggagtacgaagtactagaaagagagcggctttcctctaagaatggcgggtggcggcgccggcgacgacgacgtggtggtggtgagctgcggcggcagaggcggcggcgaccccggcgcatacgccgcggtgctcaagaggaagctcgacctgtactgcgccgccgtcgccaaatccatggtgtggttcctcctcctcctacccctccaaagattagacttttctaggcctatttgagtattggttgtgtgattgtgccttgtgtgcttcgatgtttcagtttcatctctagcttaatttcgagtcacaatggtaggaattgcatgtttttcagttatttccccccttcattttggggaggggagttttactgcaatttctagtttttggaaatcacaagcagcagaagaaaaagtcggttgctttatttgaggactctggaaaatgttgaattgattggtcggtatgcttgtcgtgtaatcctacgctgccattcttaagccagggctacataaaaactcacagtagattttagcacccaccaagcaccaacagatagaaagaaagaaaaaaaagtttcccagcctttgacaaacattagaaaacacagcactgtgcacacaccggcacccatttctcttatggcttgtgatgaacagtatgatcaagatcagagctgtgccattgtcatcgtagtactgtgcagcggcgaaatccaaatgttccaactttacatgggtaccgtagcagatattgctttctgatctgatgcaagtgtagtggagtcctggagtggtgaaactgacatgtgggataatagatttggtatatgtgccatgttgctaggaggcaggctcacttccacacactacatacactgtggtggccggtgggatattctgatggaatgttatggaccacaaatgatttgaatgagtatgatgtgtcggtggtcgagccaataggattttctcctttttgtttctttgtttttttcctggctgaaagcgacaggaaacaaaacaagatgtggatttgaataaatagaactgcaaattcactgtatttagctatttatccgatagtatcagatgttctattgaattgatgaacatgttcacagtttgcgatttgcacatttccctttctcagaagtaaaaataccatacttcactgaatgctagcagttttactgtggctatttttcaatactcttccgcagttgtttgaactagcaaggttaagaatatctaggttttcacaggtggcatgtccaaagattgttatgtgaaaatgaatttgcacgttgattttctaagttaattagcaccacaagttagtttagcagttactttttccataagtagatgctgtaaaaacattatgcatggtggctctcagtcaccctataaataacacacttacttccaattttcttaaatatttagaggctggccttggcacaaccatgatattgaccattgcatccaatgattccacaaaacttcgagctatgtgtgtattatttatataaattatgagggtaaggatgtgcagtactagtggctttccagagcttaacagtgacataaacctcgcgtactggctgcacccagccctttgcccctttgttgcagtgatgtttacgtaagtccatttcaggaagctaaatcacaagaacattcgttgggctaccccaactcacaagcttcagatgcttcgcaattgatttctcaagcttcctttgatggtatttatgacctctcataactgagtgcatgtcagtctatcaaccaacttggggtaaacatgcaggcaggaagatttcgaaggaagtagtgccttaggatggcaggatgtggtctggtttaaaagcatgttagatgccaaatcctattcagttcaccatctccccgctgatcattccaatagggcattagatgcaaacctcacttatcctagtacacttgattaccagccttggtttgagtactgtgagtgtgaagtgtgaaccattcactagagtctacaggttagtcttccatgataattacgtgcacaagatccgatctcaccagcagtttcagtaggataggttagctgatgctcaaggaatccaggtgagtagaaatatcaattccggattacctttgtggtgtggttgaggttgatgtgccggctcattgataattctggaggaatgatctaaactatgagcaatgttggtgagatcagatataaggatgaaaaatgaagtctgatactgcttcagttatactgaacagtcatgtcaactctgttggtgagctgcactgggcatgcaactctggcaccagttttgcactctggcagtgtgaagatatgatgcatgtgtggttcagaaaatatataggccttttttgtgacatttgaaccgttggacttattttactgtactgttttggtttcttccattctacacacaggtgacatagatggggcaagcctagttacaaactctaatgtcatagaagatgatgattttcaaggcaagccaaccaacagtggcacatcaaaggaactgtcagacgatgatggtgaccttgaagagaatactgaccccgctaacgccaagaagatgaggaggtaacatagcatcacaacattttcttgacgagaaatatgactgctaaatagaaaccattacttgattttgttgcgagtgaaagatagatttatcttgttagaaggcatcatattcagttttaccgttcactcctaccattcactgcctttaaaggcagaaagaatccaatcacataaagctttatccaattatccatgcccttaaaaactttcaaaaactgttacattcctagaaaaattggtaattccgtctgaagttgcgggaatagaaaccacatataccttttgccattagtttcctttttctatagatctgtcacctttaccttgaatttacatgaaacatggtatgtgacgtcagaagcttaaccgtccatttctgtgatgaactgctcagttaaatttcggtgttgtgatcagaatggtgtcaaaccgggaatcggctaggcgatcaagaaagaggaagcaagcacacttgaccgatcttgaatcacaggtttcaattgtgttagaatatagatgagtgctcaagttaatatccaactaaaatgaatatactcgtgctaattaccgcacaactctccaggtttccaggttaacgtctgagaatgcatctttgctgaagcgactggctgatatgactcagaaatacaaggacgcttccgttgacaataaaaatctaacagttgatgttgagactatgaggagaaaggttcgttcgtcttgaatgcatcacagacctttttcttcttttttttgttgtacgagaactcttaactgcatccatttatcgatcataacatttttactgggctctgtgtatactcaccgtaatcaacgtttacatctctctagatggctgcaaagggcagtgaaagtaatatgattgttcatagttcttattttagaacctgcaagttcagttttagtttctaatggtttttaactgcacacaaaaggtatggcagcattttcatttgattttctgaaattctgcataccttctacaagtgtgataggaataatttagttccttggttttgttttcttgcagtatcatttcagaaattttatttccttgtattatatatatatatatatttaaagaataacagtgttctcttacaggtgtgaggagttgtaaaacgaaacaaaacattaaaagcgcacataccatgccgcaatgcgccaagtgtgtgtcccattaagcctgtggggtgttgcccttgccttgccttgtggatgggctgctctatctcaaatgataccgagaggagtccaaacagaatactaccatacaaacatttcttaatgcttgtgtgtgagtatatgcacaactctgtactcttgtatcattagtaaaactgtgtttttttaaatatccatgctgaagggttctaacataatcatgttaagtttttatgaaaaaaatttgcttaaactatgactgttccaatcagttttttacctaaagaaggtattcacaagaatcttggcatttaacagacctgcacaccttgactttatgaaaagggacatgtcttcaggaacacagtactgttttaattccaggtgaacatagccgaggaagctgtcaggaggctaactgggatcaccctcatgctaccgaccgcttttgagaagcccacgagcagcgcgcccctgtcatcatgtccatctgatgcagcttctgcttctgcttctgccgccattgaagacagcgtgaagcatttcctccaggcgccacttgaaaacagtgggatcatcccaaacgcagcagtttttcagaccaagccagcttctctgcaccgtgttgctagcctggagaacctgcagaagaggatcgtcggggatgcaatgtattccgagaccgcgtcaacgacattctcagatcctgaagctcttgccgataggtaaaggttgctcctgtcctgtgatgaacagccgtgtgatgctctagcggcctaagtgcttctggtaatggaagttgtagcacccatgcgcctgggtggggtctacacagtgatttgtacactattttgaaggttaataataattgttgagaaatgatctcatccctttgtacctatataagtaaagtattccattaataaagagaatagagttttcactcttcat

SEQ ID NO: 40 - protein, 201 aa, Zea mays
MGRGPVQLRRIENKINRQVTFSKRRNGLLKKAHEISVLCDAEVALIVFSTKGKLYEYSSHSSMEGILERYQRYSFEERAVLNPSIEDQANWGDEYVRLKSKLDALQKSQRQLLGEQLSSLTIKELQQLEQQLDSSLKHIRSRKNQLMFDSISALQKKVSYTLDSLVPGILRVLHESLVKIIVTSTPPAFGELEQTLTSVTS

SEQ ID NO: 41 - protein, 337 aa, Zea mays
MGKNGLVSIFSRLVDSAAPTSTSAAATPWQWSACGTNPQTTSFRAGAGGDDDEPCCTATPPTAAAAAASRSVHRKPAAMGRGAPPGEMYKTVNSVFLDDPAADDFFFSLAGDGDDEEEVAGLYLDDNDDDDGFSTTTASEEWSEEAVIRSLGRTSTDRFFFDPQPGPLPASNSILATTAAAAAETPARKKTVPVPVPVPGPTEEEDATATHADEGDGVKKQRQPTTAAAAAAAVSSSLAERSVAVAVDSGDPYGDFRASMEEMVSAHGLRDWAQLEELLAWYLRINGKQHHHLIVGAFVDLLLGLSTSSPSSSSSPPSSTAAETSTTTTSSTSTGCS

SEQ ID NO: 42 - protein, 263 aa, Zea mays
MSSSSSSRARRGGSGSLQQFPVGRWRHVAVVDAGCGCRPRRATTRLLSQLPSFLRPSPKPPQPPPPPRSSSRSSSGFFPSSAASTASSSATTFTTTHSSHSNYDSSYTHHPTTTKHLASAADKPPAAAAGRRRQQLQGHHHHHHQGSRRKKRYEKMGGPGAGAAADADADAAAAEGGVGGVAVEKESSDPRADFRESMTQMVLEMGLCGWDDLRCMLRRLLALNAPRHHAAILAAFAEVCAQLTTAAPPYHAAAYDYDYHYHY

SEQ ID NO: 43 - protein, 599 aa, Zea mays
MGGEAPEPRRLTRALSIGGGGGGWVPDEMLQLVLGFVEDPRDREALSLVCRRWHRIDALSRKHVTVPFCYAVSPARLLARFPRLESLAVKGKPRAAMYGLIPDDWGAYARPWVTELAAPFECLKALHLRRMVVTDDDLAELIRARGHMLQELKLDKCTGFSTDGLRLVARSCSSLRTLFLEECQINDKGSEWIRDLAVNCPVLATLNFHMTELEVMPVDLELLAKSCKSLISLKIGDCDLSDLIGFFQSATSLEEFAGGTFNGQGELTKYGDVKFPSRICSLGLTFMGANEMPIIFPFSAILKKLDLQYTFLTTEDHCQLIAKCPNLLVLAVRNVIGDRGLGVVADTCKKLQRLRIERGDDEGGVQEEQGGVSQVGLTAIAVGCRELEYIAAYVSDITNGALESIGTFCKKLYDFRLVLLDREERITDLPLDNGVRALLRGCTMLRRFALYLRPGGLSDAGLGYIGQCSGNIQYMLLGNVGETDDGLISFALGCVNLRKLELRSCCFSERALALAILSMPSLRYVWVQGYKASQTGRDLMLMARPFWNIEFTPPSSQNAGRLIEDGEPCVDSHAQILAYGSLAGKRLDCPQSVVTLYPA

SEQ ID NO: 44 - protein, 86 aa, Zea mays
MKDETKGEIYVAFNTSHLPVVVGLLERSGFRWEPVVDTGKEAPYDFLTDGLPDRAVTVYQFSHFLNSNLYPMLSYSSIILVLRPDV

SEQ ID NO: 45 - protein, 523 aa, Zea mays
MDVALSTIVFVIAIFIPALLTLVQRSRSRHAGHNPPPPPEPRAIPLVGHLHHLLRKKPLHRCLAHLAERHGDVLGLRFGSSRVAVVSSASVAQQCLVALDTSFGNRPRLPSARILSYEWSTMGHSNCGPYWRQARRTTSTEFSSVERVQHFADVHEQEARAMARRLCRVAHASGGRALVDVKSRLLEMLMNGLLDMLFRRTTSRSRSSDEKDEAVEVSEEARCFMAMAEETMELTLTVWDFLPPLARWLDVDAVGRRLQRLQANRTEFLQRLIEEHKEMEKSGQVTRRTLVGVMLELQDKDPEAYTDQLIRSLCVSALEAGTLSTGYTIEWVMSLLLNNPHIMKKARDEIDACVGEPKRLLDATDLPKLPYLRCIILETLRLYPVVPLLVPRESSTNCTVNGFNIAKGTMLLVNTFAIHRDPRTWDDPETFLPERFEDGSNQSGKTTMDLSFGMGRRRCPAENLGMQLAGIALGTMIQCFNWERVGTELVDMAEGSGLTMAKKVPLEAFCQPRASMVDLLANI

SEQ ID NO: 46 - protein, 639 aa, Zea mays
MDKNYGELYNILGWGEEYFAVNTEGHLSVKPFGRWTEPGQEIDVHSVIVEALATQPNDSTSKSQFPMILRFPDVLKNRIETLHNAFNSAMESTGYTSRYQGVFPIKVNQNKHVVQDMVRFGQQWNYGLEAGSKPELLIAMSCLPVTEAEPKPYLICNGYKDADYIALALSARAMGLNPIIVLEMEEELAIVLDQYRKLQQKLPDDDAVRKKFEPIIGIRAKLLTKLPGHFGSTAGKHGKFGMLADQIYEVAETLGKEGKLHWLQLLHFHIGSMIPTTGKVYDAVSEAAGIYCNLVNEHGAKWLATLDCGGGLGVDYDGTRSGDSDMSVAYGIQEYASAVVQAVRLKCDYNGVAHPVVCTESGRAMASHHSMIILETLSAIPEPQDEDTSEQLLNRIQDLSYKQPRAPVGGATAAVYSHAADLKKHGIEMYKLGKKLGKRVVADANTVYNYHMNLSVFSLLPDFWGIGQLFPMMPVSRLNEEPTLKGTLVDITCDSDGKIENFISRENTLPLHLFEPSLGGYYVAVLVSGAYQEAIAGKHNLFSGPTLVRVNSSTTKDGGFEIERVDLGPAADEIIGSMRYSVEEDIITVIEKKAKGTEEEERVWAWEMVEPLMTKALTTMPYLNEYKVPEPEPEPEPIP

SEQ ID NO: 47 - protein, 260 aa, Zea mays
MAASALHQTTSFLGQALVSRAAGVDAGGRITMRRTVKSVPQSIWYGPDRPKYLGPFSEQTPSYLTGEFPGDYGWDTAGLSADPETFARNRELEVIHSRWAMLGALGCVFPEILAKNGVKFGEAVWFKAGAQIFSEGGLDYLGNPNLVHAQSILAIWACQVVLMGFVEGYRVGGGPLGEGLDKVYPGGAFDPLGLADDPDTAAELKVKELKNGRLAMFSMFGFFVQAIVTGKGPIENLFDHVADPVANNAWAYATNFVPGN

SEQ ID NO: 48 - protein, 971 aa, Zea mays
MSTAKVVLEPAFQGAGHKPGTEIWRIEDFKPVALPKSDYGKFYCGDSYIVLQTTCKGGAFIFDIHFWIGKDSSQVVGFLCLLLRSPTTLQTTFRAHLSKTVLVTQDEAGTAAIKTVELDSMLGGRAVQHREPQCYESDKFLSYFKPCIIPMEGGFASGFKKPEVDKFETRLYICKGKRAIRVKEVPFSRSSLNHDDVFILDTENKIYQFNGANSNIQERAKALEVIQHLKEEYHDGVCAVAIVDDGKLQAESDSGEFWVLFGGFAPIGKKAISDDDVVLETTSPKLFSISNGQLKLEDAVLTKSILENTKCFLLDCGAELFVWVGRVTQVEDRKAASAAVEKYIIKENRPKTTRITQVIQGYENHTFKSKFESWPVSNTSGSASTEEGRGKVTALLKQKGVDVKGISKTSVPVNDEVPPLLDGGGKLEVWCIDGSAKTALPKEELGKFYSGDCYVVLYTYHSAEKKEEFYLAYWIGKNSVQEDQEAAFQIANTTFNSLKGRPVQGRIYQGKEPPQFVAIFQPMVILKGGTSSGYKKFVEEKGLKDETYCSDGTALIQISGTAVHNNKTLQVDAVATSLSSTDCFVLQAKNSMFIWNGNASSFEQQQWAAKVAEFLKTGVAVKHCKEGTESSIFWSSIGGKQSYTNRNAAPDVVIREPHLYTFSLRNGKLEVTEIFNFSQDDLLTEDMMILDTHCEVFVWMGQCVETKEKQKAFDIGQKYVQHAVAFEGISPDVPLYKVNEGNEPCFFRTYFSWDSARSVGGNKGSGDGGPTQRASALAALSSALNPSSQGKQSDEKPTSSDDSEHTQRASAMAALSSALNPSTKPSSTQTQSHSGQGSQRAAAVAALSNVLTAEGSHSPRHSRSSPTADADKTELVPTSPHQLETGTAEDVRTEPDVSQEQTAKENGGQTTFSYERLISKSTDPVSGINNKRRETYLVDSEFETVFGMTKEEFYEQPRWKQELQKKKADLF

SEQ ID NO: 49 - protein, 254 aa, Zea mays
MALLQSQSLPGIGCCSSSIVLARARVQQCLAAASHSQAPLLQANGGRAGLPSSSSILKAGNAISFSRRRRRDLRVVAEAATAGTAKVTPASSGGVSLSDVLWPSAGAFLAMAVLGKMDQMVAFKGVSLTIAPLGAVCCVLFSAPDSPAAKKYNMFVAQIACAAFGVLALSLFGPGWLARGAALSACIAFMTITGTSHPPAASLPLLFIDGPKFHSLQLWYALFPGAAGCIVLCLIVTRGGGLPEEELQVLTQAA

SEQ ID NO: 50 - protein, 289 aa, Zea mays
MAAPLTAVRARLLLLPVTCTAAGTTGRPAPPSKSSRPRLLPPGTTRCRCSRPPMEAVAPVSAAAVAALLLLPADAALAVGGELGILEGRSFALLHPLIMGGLFAYTLWAGYLGWQWRRVRTVQDEINALKKQLKPAAAATPAAVGAGADSSSTTTPPPAAASKSPSPAEARIEELTDERKALLKGSFRDRHFNAGSLLLGLGVLESVGGALNTWFRTGKLFPGPHLFAGAAITVLWAAAAALVPAMQKGDETARSLHIALNAVNVLLFVWQIPTGLEIVGKVFEFTTWP

SEQ ID NO: 51 - protein, 1545 aa, Zea mays
MEPIVLNRERAAADRLKRMPMLFDDYREEDFYGLPRKYSIVARVEVKFPKEPRFRDRQHFVLSDINGAKIEAITYMYETVKHFDNLLHEKHVYKMHNVKFSLHPGEFNFRHLNGPMELCLDQQTIVEPYTVPIQMAPFPKQILLNLADIAELPNRTLVDIMAVVVHLDTIQRTMWGPFRKIVIMDASITIHPCSCCHCTVTFAHSWSAYSPAGFFMENGEPTETDQMEHNDGRTPLTNISNTITIADENGSKRLGPNVDAKERKRQRERERYAAMTVEQKNEKSRKRREASQRNKGPPIQTEASRVSLSDGCSTIDFTNFATQVPNVNRDDDSDWLHRNETFKSDDVFTTRDLLTPGGVHETVGNTPNHNLGRAAYFRERYKNLTPAERELNREHLRLYNNTPKRKGSKIEYIRKRRALLADTLSQESIAMESPTYTPEVVHPTTDAIEPNGSALTPSDWVIPDIASNPFLPASTQTEDADSLRMSTRPLRRKQHVPRGERQAILARRNRQFEASISRNMANVAEDIISDAEEEDDSTQTHMSAKINNNVDDDDGVVFEDDADENEGYLFAGQYEDTDEDIEIDGSQDESSATDVPDPYDKVYSNIPEETHMLKTVPNCGYCTAKKFEYETPGFCCRGGKVELAPLETPPQLKRLWDSADSDARHFRDNIRAQGMMYHNIKSFGREGGAEHKHLELYFYDDDPTLEHRYRKCREEHQQKDKEVIRQIVDILRGNPYSEHLRTMGHVDNLDDYRIALNLDQTLNQKTYNTPLTSEVAAVWIEGSEGRGQFSKSVMLHGKDSSNHCIRSYHGCYDALSYPLFFPRGELGWHANIPKVGVSMDEVDAYRATHRASNANDEDAESPSHLCVSVRDYYCYKFQIRPGVFNPILHGKRLFQQFAVDTYIKIESSRLDYIRRNQDRLRADLYQGLVDSMLDGDIRAEKVGKRTVLSTSFIGGPRDMRRRYMDAMALVRKFGKPDIFLTMTCNPNWDEIRRELLPGQTPQDRPDLVVRVFHAKLQELKHRLTKQDILGKVRAYVYVVEFQKRGLPHAHFLLIMQRKYKLTCPEQYDLLISAEIPSNKYPELRKMVIKHMMHGPCGSLNPNCPCTKGRKSCKNHYPRPFSDTTLQGKDSYPIYRRRDDDRKEKVRGCELDNRWVVPYNPYLLRLFNCHINVEACGSIKAVKYLFKYIYKGHDRASVVMRDASKADDDVDEIKQYRDARWVTPPEALWRIYGFELSQISPPVMQLQLHLPNMHMVAFHERQMVERVVNRPGVDRSMLTSYFEANMLHDEARCILYRDFPEWYTWQSGKGKVWQRRKRDTGGQVGRIVSAHPAEGERYYLRVLLNHVTGATSYVDLRTVDGVTLPTFREAAERRGLLESDNTLDDCLTERALFQMPSSLRRLFATILVYCEPSDVAVLWQKHKDSMSEDYQHKSQNKTHVEQMVLIDIRNMLQSMGKDIKTFPLPPIIDAYDDAIGTAREVYEEESIEPTAGDVALKDSLNEEQRDAYDKIMSAVDTDQGGLFFVDGPGGTGKTYLYRVLLATLCN

SEQ ID NO: 52 - protein, 870 aa, Zea mays
MPSSPPRLAMEHRRRQPPAPSAPTYLAATLAFLTLAAVAYFRAAFPRFPHPPATRGCRHDAEGSWSAGVFLGDSPFSLKPVEHWRISSGPGAAWPVANPVVTCADVAEAGFPSSFVANPFLFIQGDSIYMFFETKNPIASQGDIAAAVSKDAGTTWQQLGVVLDEEWHLSYPYVFSYGNETYMMPESSKKGNLKLYRAVDFPLKWELEKVLLERPLVDSVIIHSKGSYWLIGSDLSSYGAKQTGELFIWYSSSPLGPWSSHKQNPIRNTGNRPSARNGGRPFIYNDNLYRVGKDRGGGSGYTIQVFKVQVLTEDHYKEVAVPFVLDKPLKGRNAWNGARSHHFDVQQLPSSQHWIGVMDGDRVLSGDSIHHLTIGCMFYGAACILVLLLGGLIGAIKCTLPLRWYLPHTEKRSDNFDIEKQVLLCHKLSWLICNVNRLGSLIGGKINYRAWKDRVYIAFIILVSVVLTFLGTNYIFGGDGAEEPYPIRGRYSQFTLLTMTYDARFWNLKMFVEHYSKCASVREIVVVWNKGRAPVQGELKSMVPVRIRVENNNTLNNRFKIDKEIKTGAVMELDDDIMMACDDLERGFKVWREHPDRIVGYYPRLAEGWPLEYRNERYARQQGGYNIILTGAAFMDHELAFKRYWSKEAEIGRQIVDSFFNCEDILLNFLFANASSASTVEYVKPAWAIDMSKFSGVAISRNTQEHYHARSKCLAMFSGIFGNLTSKRTNDLISLQINQRLSQSIPGYFTLHNYITGLMLPEGKRNKLSDFIRWENGKPPPLAAKYCGMRVNVLFSMHLSIMFFQKAVCEVQFTYNQAKDDAACSSREKRVPKLQTVKLGAIDKQEGQARSCKNPEIISSEQNKSSVRRR

SEQ ID NO: 53 - protein, 622 aa, Zea mays
MASVHKATTLVLMFCLLALGRAEYLKYKDPKQPVAVRIKDLLGRMTLAEKIGQMTQIERENATADALAKYFIGSVLSGGGSVPAPQASAQAWAAMVTEMQKGALSTRLGIPIIYGIDAVHGHNNVYKATIFPHNVGLGATRDPDLVKRIGEATALEVRATGIPYAFAPCIAVCRDPRWGRCYESYSEDPKVVQSLTSLISGLQGDAPADSAGRPYVGGSKKVAACAKHYVGDGGTHNGINENNTIIDTHGLLSIHMPPYYNSIIRGVSTVMVSYSSWNGVKMHANHFLVTDFLKNKLKFRGFVISDWEGIDRITTPPHANYSYSIEAGVGAGIDMIMVPFRYTEFIDDLTTQVQNKVIPMSRIDDAVYRILRVKFTMGLFENPYPDSSLAGELGKQEHRELAREAVRKSLVLLKNGKSSYAPLLPLPKKAGKILVAGSHANDLGNQCGGWTITWQGSSGNTTAGTTILSGIEATVDPSTQVVYSESPDSGVLADKYDYAIVVVGEPPYAETFGDNLNLTIPAPGPSVIQSVCGAAKCVVVLISGRPLVVEPYLGDMDALVAAWLPGSEGQGVADVLFGDYGFTGKLPRTWFKSVDQLPMNVGDAHYDPLFPFGFGLTTKGTK

SEQ ID NO: 54 - protein, 1002 aa, Zea mays
MKSLFKSKIRWQHRSNDPASPSGQPQPQPQQALGPPSPSPSSSPSSAAPLSVSTAATSSPSSPPSAAATPTGAGAAAAAGAGAAGEDYIASEEEFQMQLAMALSASSNSDCVGDLDGEQIRKAKLISLDRFAAHRDEGHTAESLSRRYWDYNFLDYHEKVIDGFYDIFGSMESSRQGNMPSLADLQTGIGDLGFEVIVVNRAIDSTLQEMEQVAQCILLDFPVANIALLVQRIAELVTDNMGGPVKDANDMLTRWLEKSTELRTSLQTSLLPIGCIKIGLSRHRALLFKILADSVGILCKLVKGSNYTGGDDDDAINIIKMDNEREFLVDLMAAPGALIPADILSWKGNSLNSNRKLGLSQTAGSSSTVGANMGPSVLPLEPKGDQLPLFSSGDWISESGSGYGAAETAASTQTSSGATSSVPAGSAFDSSWMLINHDQSDGPSTSAGTSSQQKVVPQNEHPRNLNRLPDLQEIPESKNLFADLNPFGDTKSKKTSVPFKGPDQRNNELQKRRENIVPNGGRPQQRLVMKNWSPYNDVSNNKQYNYVEDSFARRNVGNNAASSSSQITQQAARSNLNSGLRNDASYHNYDSIMAGTSATNITSTAETGKVPERVLRGDLDKGQTNYRLQDQHVVGQPPQERLPWGNPAEGRVPMNRFQNQAKQHMGNIDTKQDHKKLLPDPKKSPLDRFMDTSLPSRNLDVRSQRLDFDDVSECEIPWEDLVIGERIGLGSYGEVYRADWNGTEVAVKKFLDQDFYGDALDEFRSEVRIMRRLRHPNIVLFMGAVTRPPNLSIVSEYLPRGSLYKILHRPNCLIDEKRRIKMALDVAKGMNCLHTSVPTIVHRDLKSPNLLVDNNWNVKVCDFGLSRLKHSTFLSSKSTAGTPEWMAPEVLRNEQSNEKCDVYSFGVILWELATLRMPWSGMNPMQVVGAVGFQDRRLDIPKEVDPLVARIIFECWQKDPNLRPSFAQLTSALKTVQRLVTPSHQETQSPHVHQEISVNLTP

SEQ ID NO: 55 - protein, 528 aa, Zea mays
MARGDGGQLAELSAGVRGAAAVVDHVAPISLGRLILAGMVAGGVQYGWALQLSLLTPYVQTLGLSHALTSFMWLCGPIAGLVVQPLVGLYSDRCTSRWGRRRPFILTGCMLICVAVIVVGFSSDIGAALGDTKEHCSLYHGPRWHAAIVYVLGFWLLDFSNNTVQGPARAMMADLCDHHGPSAANSIFCSWMALGNILGYSSGSTNNWHKWFPFLKTSACCEACANLKGAFLVAVVFLVLCLTVTLIFAKEVPYRANENLPTTKAGGEVETEPTGPLAVLKGFKDLPPGMPSVLLVTAITWVYAIGHTDYLSWFPFILYDTDWMGREIYHGDPKGSNAQISAFNEGVRVGAFGLLLNSVILGFSSFLIEPMCRKVGPRVVWVTSNFMVCVAMAATALISFWSLRDYHGYVQDAITANASIKAVCLVLFAFLGVPLAILYSVPFAVTAQLAATRGGGQGLCTGVLNISIVIPQVIIALGAGPWDALFGKGNIPAFGVASAFALVGGVVGVFLLPKISKRQFRAVSAGGH

SEQ ID NO: 56 - protein, 523 aa, Zea mays
MGGVPQPPLVPRQEQPPLEQPPLVPRQGLRTAGQGRQDSGVRVGWIGRLMSSWCHADLAATKRATHVLTDLAKIILAYSVGIPCKLVKGSNYTGGDDDDAINIIKMDNEREFLVDLMAAPGALIPADILSWKGNSLNSNRKLGLNRTAGSSSTVDANVDPTVLPLEPKGGQLPLFSSGDWMSDIDSGYEAAEIAASTQTSSGVTPYLCSAGSVFGSSWMLVNHDQSDGPSTSAGTSSQQKVVPQSEHQRNLNRLPDLQEIPESKNLFADLVPSGDNKSKKTSVPFKGPDHRNNELQKRRENIVPNAGRPHQRLVMKNWSPYNDVSNNKQYNYVEDSFARRNVGNNAAPSSSQMPRPAARSNLNSRLHNDASYHNYDSIMAGTSAMNITSTAETGKVPERVMRGDLDKGQTNYRLEDQHVIVQPPQGRLPWGIPAEGSVPMNRVQSQAKQHLENMDAKQDHKKLLPDPKKSPLDKFMDTSLPSRNMDMRSQRLDFDDVSECEIPWEDLVIGERIGLGTYFATKF

SEQ ID NO: 57 - protein, 111 aa, Zea mays
MDHVARLASERAVVVFTASNCSMGDVVTSLLSSLGVNAAVHDLDRDPRGMEMERELARRLGGGGGRGTTTTPTVPAVFVGGDLVGGTNRVMALHLSGELVPMLRKAGALWL

SEQ ID NO: 58 - protein, 276 aa, Zea mays
MSSPRPPLGRILRLAVAVAACACFPSPVSGIRKGIDFIQPIVCRSTVQGRHLISDDNGYVCSALSINPWSHCCPTTGDRFSCQGCELDLQCCNSYEYCVSCCLNPSKIKKEDVLKLKVAKPVTAGTYTNVFDFCMGRCRHSSASVVHENAYASDFHHCFSVQQNSSGSTESSSVSKLLGINVVVGRPRESCSLVCKVRGQSCVPSRLSVLNKCEILQKYMRCKSGCFPSLGPDQPAEVVDEAPTSLNPGACLYMQMDERLTCDGSHHHTRRLCPCA

SEQ ID NO: 59 - protein, 131 aa, Zea mays
MDAGMRPPSIGIGFGGGDWALENNMAKEYAILIVLISMVLVVSCNVVDGSAADMRHATLPRKGLKEDIKLAINGVNSPVSSISGQASSNSETGTDNDMSSATAFTSKVTTTQGSHRGYEIHGFQGSKISPP

SEQ ID NO: 60 - protein, 231 aa, Zea mays
MACPAQSMLSASGCILLRSKPRASSSHVRGGIIGGGCSSRPFQLTCNASSSPSPPSPAPAQEDPDCNDEECAPEKEVGSLRAEWLAEERTQVVGTFPPRKRGWTGLVEKDTAGQTNIYSVEPVVYVAESAISSGAAGMSAEGAENTAAIAAGLVLITVAAASSILIQVNKSQPQVPEAAYNGPPLSYYVAKFQPAQTLEAPAPAEAVEAQDGAATVQDSAAPEAQEAVLIS

SEQ ID NO: 61 - protein, 938 aa, Zea mays
MAASVSTSRVICLQKPGPEGSSRGAREVAPFTRQSVAAPRRPHGANASVIIGSDSGAGRGQHSPPLRAVVDAGPVQTTKKRVFHFGKGKSEGNKNMKELLGGKGANLAEMASIGLSVPPGFTVSTEACQQYQEAGRALPPGLWAEVLDGLRWVEEYMGAALGDPRRPLLLSVRSGAAVSMPGMMDTVLNLGLNDQVAAGLAAKSGDRFAYDSFRRFLDMFGNVVMDIPHALFEEKLEAMKKAKGLKNDTDLTATDLKELVSQYKNVYVEAKGEPFPSDPKRQLELAVLAVFDSWESPRAKKYRSINQITGLRGTAVNVQCMVFGNMGNTSGTGVLFTRNPNTGEKKLYGEFLVNAQGEDVVAGIRTPEDLDAMKDDIEFTVQESRLWMLQCRTGKRTGKSAVKIAVDMVNEGLVERRAAIKMVEPGHLDQLLHPQFENPSAYKDQVIATGLPASPGAAVGQVVFTAEDAETWHSQGKSVILVRAETSPEDVGGMHAAAGILTERGGMTSHAAVVARGWGKCCVSGCSGIRVNDAEKVVKIGGNVLREGEWLSLNGSTGEVILGKQPLSPPALSGDLGTFMSWVDDVRKLKVLANADTPEDALAARNNGAEGIGLCRTEHMFFASDERIKAVRQMIMAPTVELRQQALDRLLPYQRSDFEGIFRAMDGLSVTIRLLDPPLHEFLPEGNVEEIVRELCSETGANQEDALARIEKLSEVNPMLGFRGCRLGISYPELTEMQARAIFEAAIAMTNQGVQVFPEIMVPLVGTPQACILLFCFFCELGHQVALIRQVANKVFTSMGKTIGYKIGTMIEIPRAALVADEIAEQAEFFSFGTNDLTQMTFGYSRDDVGKFIPIYLAQGILQHDPFEVLDQRGVGELVKLATERGRKARPNLKVGICGEHGGEPSSVAFFAKTGLDYVSCSPFRVPIARLAAAQVLV

SEQ ID NO: 62 - protein, 170 aa, Zea mays
MAPTVMMASSATAVAPFQGLKSAASLPVARRSTRSLGNVSNGGRIRCMQVWPAYGNKKFETLSYLPPLSTDDLLKQVDYLLRNGWIPCLEFSKLGFVYRENSTSPCYYDGRYWTMWKLPMFGCTDATQVYKELQEAIAAYPDAFHRVIGFDNVRQTQCVSFIAYKPPGSE

SEQ ID NO: 63 - protein, 236 aa, Zea mays
MPVLADKYHAIAFDWLGFGFSDKPQPKYGFDYTLDEYTSSLEFLVNAVAPDKLSIVVQGYFAPVAVKYASEHQDKLNHLVLVNPPITDKHLNLPSTLASFSNFLLGEIFSQDPLRASDKVLTSCGPYMMKEEDAMVYRRPYLVSGSSGFALNAISKAMKKDLKAYIESMRSILRSSSWKTKTTVCWGMRDRWLSYDGVEEFFGGLNQKIVELPMAGHHVQEDRGEELGNIIKSILR

SEQ ID NO: 64 - protein, 651 aa, Zea mays
MRPWCTAFHQTASSRQPSKAEQRAAMGREAPAMAVALLAALVASAAMFMLAGTASASPAEGIQPLSKIAVHRATVEMQPSAYVRATPSLLGEQGEDTEWVTVKFGWKEPSEDDWIGVFSPSEFNSSATCPNPWPAEEPYLCTAPIKYQFANYSANYIYWGKGSIRLQLINQRSDFSFALFTGGLSNPRLIAVSEPISFKNPKAPVFPRLAQGTSHDEMTVTWTSGYAIDEAYPFVEWGALVAGGVRHTARAPAGTLTFNRGSMCGEPARTVGWRDPGFIHTAFLRDLWPNKEYHYRIGHELPDGSVVWGKPYSFRAPPSPGQPSLQRVIVFGDMGKAERDGSNEYAAYQPGSLNTTDALIADLDNYDIVFHIGDMPYANGYISQWDQFTAQVAPITARKPYMVGSGNHERDWPDTAAFWDVMDSGGECGVPAETYYYYPAENRANFWYKVDYGMFRFCVGDSEHDWRVGTPQYDFIEHCLSTVDRKHQPWLIFATHRVLGYSSNAWYAGEGSFEEPEGRENLQRLWQKYRVDIAFFGHVHNYERTCPMYQSQCMTSEKTHYSGTMNGTIFVVAGGGGCHLSSYTTAIPKWSIYRDYDFGFVKLTAFNHSSLLFEYKKSSDSKVYDSFTIDRDYRDVLRCVHDSCFPTTLAT

SEQ ID NO: 65 - protein, 1253 aa, Zea mays
MPESWRPAEADALQPAAGTASASGPSARSPGNGAKGRGAGEPPGAAATRVPFHRLFAFADSADVALMLLGALGAVANGAALPFMTVLFGNLIDAFGGALSVHDVVSRVSMVSLDFVYLAMASAVASFVQVTCWMITGERQAARIRNLYLKTILRQEIAFFDKYTSTGEVVGRMSGDTVLIQDAMGEKVGKFVQLLVTFFGGFIVAFAQGWLLTLVMMATIPPLVLAGAVMSNVVTKMASLGQAAYAESSVVVEQTIGSIRTVASFTGEKRAVDKYNMSLKNAYKSGVREGLATGLGMGTVMVLLFCGYSLGIWYGAKLILEKGYTGAKVMNVIFAVLTGSLALGQASPSMKAFAGGQAAAHKMFETINRTPEIDAYSTTGRKLEDVRGDIEFRDVYFSYPTRPNEQIFKGFSLAIPSGTTIALVGQSGSGKSTVISLIERFYDPQLGDVLIDGVNLKEFQLRWIRSKIGLVSQEPVLFAASIKENIAYGKDNATDQEIRAAAELANAAKFIDKMPQGFDTSVGEHGTQLSGGQKQRIAIARAILKDPRILLLDEATSALDAESERIVQEALDRVMTNRTTVIVAHRLSTVRNADTIAVIHQGTLVEKGPHSELLRDPEGAYSQLIRLQEANQQNNGKVDANARPGKQISINKSASRRSSRDNSSHHSFSVPFGMPHGIDIQDGSSNKLCDEMPQEVPLSRLASLNKAEIPVLILGSIASVISGVIFPIFAILLSNVIKAFYEPPHLLRRDSQFWASMFLVFGAVYFLSLPVSSYLFSIAGCRLIRRIRLMTFEKVVNMEVEWFDHPENSSGAIGARLSADAAKVRGLVGDALQLVVQNSSTLVAGLVIAFVSNWELSLIILALIPLIGLNGWIQMKFIHGFSADAKMMYEEASQVANDAVGSIRTVASFSAEEKVMDLYKKKCEGPLRTGIRTGIISGIGFGVSFFLLFGVYAASFYAGARLVEDRKTTFPKVFRVFLALAMAAIGVSQSSTLTSDSSKAKSAASSIFAIVDRKSRIDPSEDAGVTVEALQGNIVFQHTVALVGESGSGKSTAISLLQRFYDPDVGHILLDGVDIQKFQLRWLRQQMGLVSQEPALFNDTIRANIAYGKDGQATESEIISAAELANAHKFISSALQGYDTVVGERGAQLSGGQKQRVAIARAIVKDPRILLLDEATSALDAESERIVQDALDRVMVNRTTVIVAHRLSTIQNADLIAVVRNGVIIEKGKHDALINIKDGAYASLVALHSAASS

SEQ ID NO: 66 - protein, 438 aa, Zea mays
MEPAKGKPRRASSSLLLRITDICKVHSVAVAENVGEKPNAGSTTGGGSSEDGAHLKVYPHQVSDHESCSGTSTARYEEAVVERLLGAVSGLKLAYVKVQQAHVPYDPERVAVAGERFASELEETAGLKDLYFGADKWSNPMHQSRVSSRIHERQRLALELQADICKKDSELVLLRAELEELERRNLELKEEADQRASQMNKEISFGIGKVGSVDTFIELFENSSKCIHDFTKLVVSWMKVSAGWDLDCSKFPADRSLVFEKRAHRKYCVEAYFARAMLAATKEEYFSMDSFYRVMSSKDPFDALVESPNSAFGRFCREKYLVAVPSTMEVSFLGTLDHRAFVEAGGHPRTQFYQTFARMARSVWALLTVARLLKPRAEMFFVKSGVRFQRKHMESVPARLTAEEAKIGVGFTVMPGFKIGCTIVRCRVYLSMLNARGI

SEQ ID NO: 67 - protein, 260 aa, Zea mays
MATYLNAPPAATTTTASCRHAFSGGSLRLLRPSRPTLHVTCQAAASSQQPSSPSRRSACLLGIACAVLLRPRAASAAETDDEPANNGWWLTEFPLPVPKIVNSKPSRPSCSIHHLTLLGSLTIVSAMSGMAEEINNAETGTRSFLKNGIYMADIGPSFAAHAYRLRSTAFDLLALEDLLGKDASNYVNKYLRLKSTFMYYDFDKLISAAEDKPPFVDLANRLFDSFETLQEAVTAKDDARIGDRYAETKLILQELMAKMA

SEQ ID NO: 68 - protein, 943 aa, Zea mays
MLRPPHRAVSAARLRHPIPRRPGERKRKTLFQSFCCSGTMGGTSKLLSSLLLTSSPLRLRPTTAAAAALFLTPPAAASRRLLLLSSPSPPRTLSTSSSSLPHGSSQASPAPSPRAPFPEWSRLVDRLAAAGYGSGAPFAADDLAIALASGCGLSDGALAAVSTCLAFARDRPDLLSSLPRKDVKILVANAAPSLFKDGEASALRLRRYLAGEETDVIVSDRAETVDIVRYLLSYTYGSSVSDSEHKKLIDSAVRNIMAELVSFSGLSQSSTFEESTPNQICSSQLERFSRPPGQNIEMKRGDWICTRCSFMNFARNVRCLECNEQRPKKMLTGGEWECPQCDFYNYGRNMSCLKCDCKRPATIPSIPASVGSGLGGVAQLLSVTSAGKSEIERKLAESDKKAERWLSKVSQLQDSADLSSLAEDEDFPEIMPMRKGVNKFVVSMHKTPLERRLTNAQYRSNNSPPASDPKISQTLDRILGRSTPTTAPNNQSVTSDAPTEALKKSTDHLGGIDPVPFVPLSADLFAKPQTNNGQSNQNGKINAEDDSSMVNNAVPLPERQSTGSLDTAEIWSEKVAEPDNAKDSPSAVSDENFPEIMPIRKGENRFVVSKKKDRSLTSQQYKRRSILEQADSSDFVPFVPFPPGYFAKKDTPIESTTDTGIVPEGSQPKGNLNNGNWNINYNKHQSQSHGAQCRPSGAAYTGTRIMGNSQGNYNGSNGESTYHGANFEQEPYNKGYRNNNYWSSDNNNSNNAWSNNSNFNNNNDWSGNNSYNSSTENGNSSYNSSHGYNYNGTWSDSNHSAWSSSSSNNNQSGSFVDNNSVTSSRSSMNDANHVSHSSGYGGSSNRGYTGKSLEGSAVKDPDPLDMSEEAKAERWFRRAAQIKDISELANIPDEDFPEIMPMRKGVNRFVVSKRKTPLERRLTSPQYRRNLPIVRSETDEDAS

SEQ ID NO: 69 - protein, 553 aa, Zea mays
MDRLTVMAPPLLVLLLLLLSRCSAAASRRGGGWWEEGEGEWRPSEEEEKGKGKGRGLFLLHRVEKVVESEGGQVRVVRGQPWPPASFACREGLMHIGFITMEPKTLFVPQYLDSSITLFVQRGEAKVGYIHKDELVERKLKMGDVLHIDAGSTFYMVNPGKGQRLQIICSVDASDSLGFGPPYQAFFLGGAGDPASVIAGFGPKTLTRAFNATYDELARILLPRTGGPIVYYTADAEPESGAAEEERGQVDGHDGVLDRGARREGAGAWVPGGRGDGGDECGGSDDAREATWWWTKLVNRVVGGAAGGGGAAEANRKGKKKKGGAPEPYNLYDSEPGFRNAYGWTVSVDKHQYEPLKHPDIGVYLVNLTAVRALPESYRPARFLVGLLSPFRVMAEEGLLLGSMLAPHVNPRATEYGVVLGGEGTVQVVFPNGSLAMSEVVRPGDVFWIPRYFPFCQVAARAGPFEFFGFTTSARRNRPQFLVGASSVLRTMLGPEIAAAFGAREKEFSKLVRAQREALIMPSSPGKEEEEHGKKGREKEESLPMVVEQAAAE

SEQ ID NO: 70 - protein, 465 aa, Zea mays
MAEDGGKAAAASAAAAEAGGGGAKEGGEERTVKLFVGQVPKHMAEADLLALFREVAAVDEVTVIKDKATKVSRGCCFVICPSREEADKAVNAYHNKQTLSGVCEHTTNLVLASSPLQVKYADGELERLEHKLFIGMLPKNVTDTELTDLFSKYGNVTDLQILRGSQQTNKAGCAFIKYQTKDQALAAIEALNGKHKIEGSSVPLVVKWADTEKERQARKAQKAQSQLSHIPNASPMQQHSSVFGALQMGYMPQYNGFGYQPPGTYGLMQYPLSPMQNQGPFQNMVQPLNQGNSIRGVNPEVSPSSVQRSFNAMQLGSPYPAMPGMQYPGSYPGGPMGNRHLGNSHNPIKAPNSNANSTVSSSPSSNAGGQVEGPPGANLFIYHIPQEYGDQELSSAFQSFGRVVSAKVFVDKATGVSKCFGFVSYDSPASAQAAINRMNGYQLGGKKLKVQLKRENNTKHSSKPF

SEQ ID NO: 71 - protein, 181 aa, Zea mays
MIFTFYKAQGLSVGASLVEEDKLDLATSLLAKAKEKGVSLMLPTDVVIADKFAPDANSQIVPASAIPDGWMGLDIGPDSIAAFNAALETTQTVIWNGPMGVFEYDKFAIGTEAVAKKLAELSRKGVTTIIGGGDSVAAVEKVGVADVMSHISTGGGASLELLEGKELPGVTALDEAATVTV

SEQ ID NO: 72 - protein, 354 aa, Zea mays
MATAAASSLLKSSFAGSRLPAATRTTPASLVVATGPRGAGAGPICASMSMSSSNPPYDLTSFRFSPIKESIVSREMTRRYMTDMITYADTDVVIVGAGSAGLSCAYELSKDPAVSIAIVEQSVSPGGGAWLGGQLFSAMVVRKPAHLFLDELGVAYDEAEDYVVIKHAALFTSTVMSLLLARPNVKLFNAVAVEDLIVRGGRVGGVVTNWALVSMNHDTQSCMDPNVMEAKVVVSSCGHDGPFGATGVKRLQDIGMISAVPGMKALDMNTAEDEIVRLTREVVPGMIVTGMEVAEIDGAPRMGPTFGAMMISGQKAAHLALKALGRPNAVDGTMSPPLREELMIAYKDDEVVDA

SEQ ID NO: 73 - protein, 218 aa, Zea mays
MAFTPATACCKASLALAPRASPRGPAACAQAALLCTPSTSVFRGLRAPASAAPAPRRRRSAASTGIVCGKVAKGSVPPNFTLKDQNGKPVSLNKFKGKPVVVYFYPADETPGCTKQACAFRDSYEKFKKAGAEVIGISGDDAASHKAFAQKYRLPFTLLSDEGNRVRKEWGVPSDLFGTLPGRQTYVLDKQGVVQYVYNNQFQPEKHIGETLKILQTL

SEQ ID NO: 74 - protein, 405 aa, Zea mays
MSALGTLSGGAAGVSGLIRLRRRVAPALAAPSHHAAGTLNCAALPDAAPLVWGRQLRPSLLLPATLLPSSSQGARRHTPRRPAAAAGREAKSVGFLEKYPALVTGFFFFMWYFLNVIFNILNKKIYNYFPYPYFVSLIHLVVGVVYCLISWSVGLPKRAPINGTLLKLLFPVALCHGIGHITSNVSFAAVAVSFAHTIKALEPFFSAAATQFILGQQVPFSLWLSLAPVVIGVSMASLTELSFNWTGFINAMISNISFTYRSIYSKKAMTDMDSTNVYAYISIIALIVCIPPAVIFEGPRLMQHGFSDAIAKVGLTKFVSDLFLVGLFYHLYNQIATNTLERVAPLTHAVGNVLKRVFVIGFSIVVFGNKISTQTGIGTSIAIAGVAMYSYIKAKIEEEKRKKSA

SEQ ID NO: 75 - protein, 396 aa, Zea mays
MALQAATSFLPSALSARKEGSVKDSASFLGVRLAADGLKLDTTALGLRTVRVSRSADIRAQTAAVSSPSVTPASPSGKKTLRKGTAVITGASSGLGLATAKALAETGKWHVIMACRDFLKASRAAKAAGMDKDSFTVVHLDLASLDSVRQFVRNVRQLEMPIDVVVCNAAVYQPTAKEPSYTADGFEMSVGVNHLGHFLLARELLSDLQSSDYPSKRLIIVGSITGNTNTLAGNVPPKANLGDLRGLAGGLNGVGSSVMIDGGEFDGAKAYKDSKVCNMLTMQEFHRRYHEETGVTFASLYPGCIATTGLFREHIPLFRLLFPPFQKYITKGYVSEEEAGKRLAQVVSDPSLTKSGVYWSWNKNSASFENQLSEEASDADKAKKLWEISEKLVGLA

SEQ ID NO: 76 - protein, 146 aa, Zea mays
MATSTAAATALLRPRPAVPAKLAQRRCLHAVAGWTTMRRRGAAGVVRAFFNPLGDERILREAIKFEFQYPFSRVYDCMLAKFILEKEPVAFMGGVFAGLLRLDLNEDPLKEWISRTVEASGIAEENSSEESSEADQNDAPQQIEIE

SEQ ID NO: 77 - protein, 1116 aa, Zea mays
MALQLRRLLPHGYAQRHRAVIHALSLLPPPPAMLQFEVFQRYSSSPWPFSPFRPCKMCGVAFRSNSTRKISSRNNFGVALQPKSSAFITPRLFGSYSSVCFRATASCGIALKANNIGNSRPFSTTYSKKIRFLVKNKISFSNLNMRRKDGSVAHSLLHRSEKCQSTLATCSTIVDEASTSTSNNSKSVTDAKTDTAKRKSSRGSKKEVDGDMKEKEVHTNKKRIFARTRKAATKTSDNISTNQENKKTDNCKLKRGADSFKEKKVNNRAKSKAEVSAASSVPEICMQSSIDGSVIEKKPLVPLYPPRAKSVVVVESATKAKVIQKYLGDMYEVLPSYGHVRDLAGRSKSVRPDDDFSMVWEVPAAAWTHLKSIKVALQRAENLILASDPDREGEAIAWHIKEMLEQQGVLGFDVTVARVVFHEISEDAIKKALMSPRYIDMDLVNAYLARRSLDYLIGFGISPLLWRKLPGCQSAGRVQSAALALVCDREAEIEQFKAHEYWTVQTDFKIQSADPSNATCIPFCIKHLNSKKLDQLSIPSQEEAQAIEKMIHSSTFEVLGVKRSKIHKNPPLPYITSSLQQDAANKLHFTAGYTMKIAQNLYEGINLSSEETTGLITYIRTDGFHISDGAVEDIRSLVKERYGQKYVSEDIRKYLKKVKNAQEAHEAIRPTSIRRPPSSLVGILDDDSLKLYTLIWKRTMACQMEASRTEMIQVDVGIPEGEMNFHSTASKLDFKGYRAVYEDDQASPCIDSSEGDCVHECNFEALSKLMVKDLVFPVNVHLGQHFTKPPPRYSEGALIKKLEELGIGRPSTYASIMKVLLDRKYVTAKSRVLHPEFRGRMVSAFLLHHFSEVSDYNFTANMETELDNVSAGSTEWKGLLKDYWERFSKYCADVSKLDGRKVERMLEEKFGPILFSDVYKDCRICPSCSEGTLRFKVSRYGEGYFVGCDRHPKCKYIARSLSQQEDETEPIEENAKSFEPRLLGVMPDSDQKVFLKQGPYGYYVQVGEDKKGLFPKRVSLSKVKDIDSVTLEDAIELLQYPKILGKHPEDDNLVLITHSKVGYNIKHRRFIAQVPKNMDPKKMTLERALKLLSSKSVRRIGRLKGKVEKKEPIEWH

SEQ ID NO: 78 - protein, 171 aa, Zea mays
MDEHGEKEENKSQDSALAAEQREETAAAEGEDTSEESTDQREDGHGYKADESAGLLPEDDVGSGEASAAPHFGHPCSLLRACAGFLGLHGCGGDQKPAAAAVAASAAEAATAAAASSSQDEEDGGVDMAKANGFYMHEVITRVWAVAVRRPRPRPPDHAREGSGGNGGVHH

SEQ ID NO: 79 - protein, 494 aa, Zea mays
MAAAVAPPLCTWLVAACLSAACGDGEKENERRHRGGGVGGFFGSRRRLGSGRRGVGRSGMAMSVALHPERTAVENKKPDMKQRRVVVTGMGVVTPLGHDPDEFYNNLLRGISGISEIEAFDCSHYPTRIAGEIKSFSTDGWVAPKLAKRMDKFMQYLITAGKKALENAGITEEVMNELEKSRCGVLIGSAMGGMKVFSDAIEALRVSYKKMNPFCVPFATTNMGSAILAMDLGWMGPNYSISTACATSNFCILNAANHIRKGEADVMLCGGSDAPIIPIGLGGFVACRALSQRNSDPAKASRPWDVDRDGFVMGEGSGVLVLEELEHAKQRGAEIYAEFLGGSFTCDAYHMTEPHPEGKGVILCIENALADSGVTKEDINYINAHATSTQMGDLKEFEALNRCFGQNPQLRVNSTKSMTGHLLGAAGGIEAVAAIQAIRTGWVHPNLNLDNPEKTVDVRMLVGPQKERCDVKVALSNSFGFGGHNSSILFAPFK

SEQ ID NO: 80 - protein, 551 aa, Zea mays
MESLRLAVTHRPALPLPTSHSHLRRRHLHLHLHSYPNPLSLSPPIASHLSPIPRRHLPPLLASASASQASSKPAASAASGGAKPLPLFLSLAAGLAVRFLVPRPAEVTPEAWQLLSIFLSTIAGLVLGPLPVGAWAFLGLTATVATRTLPFTAAFGAFTNEVIWLIVISFFFARGFVKTGLGDRVATYFVKWLGRSTLGLSYGLAISEALISPAMPSTTARAGGVFLPIVKSLSLSSGSKPNDPSAKKLGSYLVQSQLQAAANSSALFLTAAAQNLLCLKLAEEIGVSIGNPWITWFKVSSVPAVLGLLVTPYLIYKIFPPEIKDTPEAPALAAEKLKNMGPVTKNEWVMIGTMLLAVSLWIFGETIGVSSVVAAMIGLSILLVLGVLNWEDCLNEKSAWDTLAWFAILVGLAGQLTNLGIVSWMSNCVAKVLQSFSLSWPAAFVVLQASYFFIHYIFASQTAHVGALYSAFLAMHLAAGVPALMSALALAYNANLFGALTHYSSGQSAVYFGAGYVDLPDVFKLGFITAAINAVIWGVAGALWWKFLGLY

SEQ ID NO: 81 - protein, 205 aa, Zea mays
MGESSKELLDLPSDPRPPASFIESLLAGREQQQQDKEGKRKLGASTDPLPKSQGTVELALQLVQVSDQKRVIGKVKDFLGEIARANQKLQLDAQNKPPVEYDIEALTGNEEEYIEMDLLLGVADLHSEQAVEAAEATINGRQTSEMSFACSSSDSEDDSDDSDEDADDKPLTSDKDNKCKSPDDAEMGPAKGKKPNKRQKIVVLN

SEQ ID NO: 82 - protein, 170 aa, Zea mays
MAPTVMMASSATAVAPFQGLKSTASLPVARRSSRSLGNVSNGGRIRCMQVWPAYGNKKFETLSYLPPLSTDDLLKQVDYLLRNGWIPCLEFSKVGFVYRENSTSPCYYDGRYWTMWKLPMFGCNDATQVYKELQEAIKSYPDAFHRVIGFDNIKQTQCVSFIAYKPPGSD

SEQ ID NO: 83 - protein, 451 aa, Zea mays
MRECISIHIGQAGIQVGNACWELYCLEHGIQADGQMPGDKTIGGGDDAFNTFFSETGAGKHVPRAVFVDLEPTVIDEVRTGTYRQLFHPEQLISGKEDAANNFARGHYTIGKEIVDLCLDRIRKLADNCTGLQGFLVFNAVGGGTGSGLGSLLLERLSVDYGKKSKLGFTVYPSPQVSTSVVEPYNSVLSTHSLLEHTDVAVLLDNEAIYDICRRSLDIERPTYTNLNRLVSQVISSLTASLRFDGALNVDVNEFQTNLVPYPRIHFMLSSYAPVISAEKAYHEQLSVAEITNSAFEPSSMMAKCDPRHGKYMACCLMYRGDVVPKDVNAAVATIKTKRTIQFVDWCPTGFKCGINYQPPSVVPGGDLAKVQRAVCMISNSTSVVEVFSRIDHKFDLMYAKRAFVHWYVGEGMEEGEFSEAREDLAALEKDYEEVGAEFDEGEDGDEGDEY

SEQ ID NO: 84 - protein, 145 aa, Zea mays
MASLTELSFNWTGFINAMISNISFTYMSIYSKKAMFEGPQLMQHGFSDAIAKVGLTKFVSDLFLVGLFYHLYNQIATNTLERVAPLTHAVGNVLKRVFAIGFSIIVFGNKISTQTGIGTSIAIAGVAMYSYIKAKIEEEKRKKSA

SEQ ID NO: 85 - protein, 412 aa, Zea mays
MKSERQSAGFGFGSGPEDCDQTCVRARSSSLYPLATVERKRRSISLIPARPATTTAAAVPWHPPPAPPCAHALSPPYSPPPPQLPSVPQGRRLALLSARCRAAPGYRCGRATRCLPKCDSGKPDGGGDAGLSGRKAARPAGQGGPRRPAQFGASSCGLAFTTVAGVIMLQASQQALAATQFAGLQPADVLGDLGDVSTGFASAFLLIFFSELGDRTFFIAALLAARSSGAVIFLGTFGALAVMTIISVVLGRAFHYVDGIIPFSFGGTDFPVDDIAAACLLVYYGVTTLLDAASGDDEKINEEQEEAELAVSKFSGNGAGVMSAAGTIASTFVLVFVAEWGDKSFFSTIALAAASSPLGVIAGSLAGHAIATLIAVLGGSLLGTFLSEKIIAYIGGSLFLAFAAITIVEIVT

SEQ ID NO: 86 - protein, 290 aa, Zea mays
MSVPASAQVPHTIRSAGSCCFRSSHQLSAQNLGRHRRWRGTGKKKILSTRGVLESRNGAHPGGLMKRRKVVEHIILLRAKPNISDAEEKDMLDYLYTSQYQMRGILAVSLGRIEDPNSDNFTHAVFMRFQQKQDIAEFQSNAYYSKVVDEHVKPVSYGSVSVDFESEVEDDIIPLFRRGEDFNYGVEFMLLVSFLKTASREATEDALASLDKLISQCSASIVQATCGCCLDRPDNGYSHAAVIRFPSSDELKLFRESEEYKDMWASKFRPIVERSLHLHFTVDPVGNQLM

SEQ ID NO: 87 - protein, 170 aa, Zea mays; identical to SEQ ID NO: 82

SEQ ID NO: 88 - protein, 487 aa, Zea mays
MAAVTAAAVSLPSSSSSPAAAKAKASASASPSSPCGHLQFPRRHGGPRAVRLRVQVSTTETAEAEPVKKLEKVSKKQEEGLVTNKYKPKEPYVGRCLLNTRITGDQAPGETWHMVFSTEGEVPYREGQSIGVIADGEDKNGKPHKLRLYSIASSALGDFGDSKTVSLCVKRLVYTNDQGEVVKGVCSNFLCDLKPGAEVKITGPVGKEMLMPKDPNATIIMLATGTGIAPFRSFLWKMFFEEHEDYKYTGLAWLFLGVPTSDTLLYKEELEKMKEMAPDNFRLDFAVSREQTNAAGEKMYIQTRMAEYKEELWELLKKDNTYVYMCGLKGMEKGIDDIMLDLAAKDGINWLDYKKQLKKSEQWNVEYTGLAWLFLGVPTSDTLLYKEELEKMKEMAPDNFRLDFAVSREQTNAAGEKMYIQTRMAEYKEELWELLKKDNTYVYMCGLKGMEKGIDDIMLDLAAKDGINWLDYKKQLKKSEQWNVEVY

SEQ ID NO: 89 - protein, 225 aa, Zea mays
MQLQHGPRPGVAGAARPRSSLPRRPSLPRRRRSSSSTTRTTRTALVVLVAAATRDGARKTTASASRATAADVVRQFYDGVNRRDLAAVEPLIAEGCVYEDLVFPRPFVGRERVVGFFGEFMGTISPDLQFVIDDISAEDSAAVGVTWHLEWRGRPFPFSRGCSFYRLLGSGSDSDADSDSEQQRLQIVYGRDCVEPAAKPGDLALVIIRGVTWILERFPSLASRL

SEQ ID NO: 90 - protein, 272 aa, Zea mays
MAAQSMLMSTSVNGGRALPSLQAVRPAPYPRLPLPSSSSSSAGYRHSKSVSVKTLALFGKSKVKTAPAKKAAAPKPKPKVEDGIFGTSGGIGFTKENELFVGRVAMLGFAASLLGEAITGKGILAQLNLETGIPIYEAEPLLLFFILFTLLGAIGALGDRGRFVDEEVTGLDKAVIQPGKGFRGALGLSEGGPLFGFTKSNELFVGRMAQLGVAFSIIGEIITGKGALAQLNIETGVPINEIEPLVIFNVLFFFIAAINPGNGRFIIGEEEE

SEQ ID NO: 91 - protein, 136 aa, Zea mays
MASTNMASATSRFMLAAGVPTGSSGGRVNFASAPNRLGRRLVARADNEAAAAEAAEGEGAVATKPKAEKPPPIGPKRGAKVKILRRESYWYNGIGNVVTVDQDPNTRYPVVVRFNKVNYAGVSTNNYALDEVSEVK

SEQ ID NO: 92 - protein, 184 aa, Zea mays
MPPPSTAAAVSSIIRPTPPPAVSFHPVPLPQIRRRSSAGAAAASRLAVARAAASGARGGGDAETVFFDGGAHYGDLAANLLLGLTLLWLPLTLAAVSRAFILRYRFTSRRVTVVSGLSGADRTDFPYSSVTSVVVVPRFVGEWGDIVITLRDGTKVDLRSVPRFREVADYCRSMAAAEGSLVVS

SEQ ID NO: 93 - protein, 125 aa, Zea mays
MHTNPAMAKAAPPLLAAGSRTAITAQQPSSRKGAAGTGLFCSRAIVSKRTRVTAKLGDGELKPAGKRKFITKEEEPEQYWQTAGEREGENPMMTPLPYIIIFGMSTPFVILAIAFANGWIKVPVR

SEQ ID NO: 94 - protein, 411 aa, Zea mays
MITALQVSGGGLPLLFARRRRRAFRPPQAVASDAAAAAEGTAREDGGKVALGGSGVAVTKLGVGAWSWGDTTYWNEFRWDDTKLKAAKGAFDASIDCGITFFDTAEVYGAGVRIRAWKLDDALRPYLTTTRHKVNLTLLPNVFCRHQVSGAINSESLLGRFIKERQRKEQVDVAVATKFAALPWRFGRGSVICALKASLDRLGVSSVELYQLHWPGIWGNEDYLDGLGDAVEQGLVKAVGVSNYSEKRLRDAYERLRKRGVPLASNQVNYSLIYRNPEENGVKAACDELGVTLIAYSPIAQGALTGKYTPESPPKGPRGRIYTPEFLTKLQPLINRIKEIGGSYGRTSTQVVLNWLVCQGNVVPIPGAKNAEQAREFAGALGWSLAPDEVEELRSMARQVKPVIGFPVEKL

SEQ ID NO: 95 - protein, 116 aa, Zea mays
MSNEFFLAMFAQKIRTVEVEGKTVKLQIWDTAGQERFRTITSSYYRGAHGIIIVYDITDMESFNNVKQWLDEIDRYANDSVRKLLVGNKCDLAENRAVDTSVAQVKKLPSSCSSIL

SEQ ID NO: 96 - protein, 370 aa, Zea mays
MRFLKGSKVEVLQEADVPFGSWRPGEIVSGNGHAYFVRYDESPVDSSVAVERVPRRLMRPRPPADDPVRWSLGSIIEAFDSYSWKVAEVVRVLGKNQYLVRLLGSSLELSAHASVLRMRKLWLDDIWIVTQKYSARCLDGGAFRGQSKDKNLDHNFRMDSRQLENQNAFEGDTSRGIKRKSSAISTHPQCSEITKRLRTPNRDGRYSKLVDRSFSPLAEKVDDVDSPCIILRGKCIHAGHKWHTGTTEEFSDTESISSSVGSSSPNSTPHRSQHYNLVYQSGDSCSRTDDDEASTSERETSEHDNNGSREETHVLELHAYRATMLALHACGSISWEQEALLTNLRLTLNISIDEHLAELRSLVTRAVTSR

SEQ ID NO: 97 - protein, 256 aa, Zea mays
MAAVTSTASICPAAAGALSSLPSFITRKPTSGSRRLQQAAATTVCHCRSARVEEGLLGRRDALLLGIVFSAATPPLLAPAGALADEATAESQEGFTTYEDEANKFSIQVPQGWLVGAGEASGIKSVTAFYPEQAATDSNVSVAITGIGPDFTSLKSFGDVDAFAEGLVNGLDRSWQRPPGLAAKLIDSRAANGLYYLEYTLQNPGERRRHIVSAIGMAFNGWYNRLYTVTGQYIDDDDSEKYRPQIEKAVGSFRLT

SEQ ID NO: 98 - protein, 269 aa, Zea mays
MASTVTAANSSHGSALRTRTASPRPVAGWSCRRTLSTPAHHHHARPSPRARVVAVRAAGTQRATWLPGLDPPPYLDGTLPGDFGFDPLGLGEEPEALKWYVQAELVHCRFAMAGVAGILFTDLLRVSGNSDLPVWFEAGAAKFDFANTTALFFVQLFLMGFAETKRYMDFKNPGSQAEEGTFIGLEAALAGQQPGYPGGPLFNPLGLAKDIENAHDEKLKEIKNGRLAMVAMLGFMVQASVTHAGPIDNLLTHLSDPFNKNIIHTFSSS

SEQ ID NO: 99 - protein, 271 aa, Zea mays; identical to SEQ ID NO: 24

SEQ ID NO: 100 - protein, 471 aa, Zea mays
MQQMAMPSFAVTSPPSHGTTLWAPHARRPQRLHKRHVRSQVRAVAQAQLQYQKLGDSDLLISEVTLGTMTFGEQNTEKEAHDIIAYSFDQGVNILDTAEIYPVPMNKETQGRTDLYIGRWMQSKPRDKIILATKVAGYSERSTFLRDNAKVVRVDAANIKESIEKSLKRLSTDYIDLLQIHWSVSDCSTCIVICLTKTIFRFTFLLSEDSGLEAEGVFFYSMLHIRYLFAIQLNQISILGSKVILYVCRPDRYVALFGEFSYNPTKWRPSIPFEEQLKALQELVDEGKVRYIGVSNETSYGVMEFVHAAKAQGLPKIVSIQNSYSLLVRCRFEVDLVEVCHPNNCNVGLLAYSPLAGGVLTGKYLDANADISKSRLNLFPGYMARYNDSLAKEATLEYVKLAKKHGLTPVQLALGFVRDRPFTASSIIGATTMEQVKENIDAFTSTPRPLPQEVLDGIEDLFKRYKDPAIL

SEQ ID NO: 101 - protein, 758 aa, Zea mays
MPVTCSIYRSSLQPSTPSACRVERQRKKKKTNMTQAHSKSCFQQFWDGVQVKRNSGSFTIELLPSLGATINQSNKLRKFIISPYDPCYRYWELFLIVLVIYSAWICPFELAFLRDLPSKLLLAENIVNGFFAVDIVLTFFVAYVDSKTHLLVDDQKRIAVRYLSTWFIFDVCSTAPFQPISLLFTRKGNGLAFKILNMLRLWRLHRVSSLFASRLEKDIRFNYFWTRCSKLISVTLFAVHCAGCFNYMIADRYPDPEKTWIGAVMPTFRSESLWARYVTALYWSITTLTTTGYGDLHAENPREMLFDICYMLFNLGLTAYLIGNMTNLVVHGTSRTRSFRDSIQSASEFASRNQLPDKIKQQMLSHFCLQFKTEGLSQQAMLNCLPKGIRSGIAYNLFFTIIRKAYLFHGVSNSFIAELVMEVQAEYFPPMEDIMLQNEAAADIYIIVSGVANLITTANGNEQVYEKVEEGDMFGEVGALCDIPQPFTCRTTTLSQLLRIRKIRLTEIMQEHKEDSKILMNNLFQKLKLHESLPELKQLDRRFMHKYELFHAPQEAWLLPQPYLQYTEHKLEDIGKKIPTFCGDHGSTKLAAETNQMRLTQQGNSHDHGNYMATDGMAGEEGERNEVHINCETKEVSIHINSEDCDAASHWQTDHETVRLGSSHNTSDGITMRENQDSSNIKSSNKRVTIHTYPRNAAGSLVQNGKLINLPGSLDEIFEIGCQKFPGLRPTKLFSGDYAEIDDISVIRDGDHLFLLQM

SEQ ID NO: 102 - protein, 1364 aa, Zea mays
MSSSLVSTPFAAAAQKRLLAAPVPLHSFLLSGRRQPPRRAGTIRCAVAGGNGLFTQTKPEVRRVVPSDPRGLPRVKVVYVVLEAQYQSSVTAAVQQLNADPRRAAAFEVVGYLVEELRDEDTYATFCADLADANVFIGSLIFVEELALKVKAAVEKERDRMDAVLVFPSMPEVMRLNKLGSFSMSQLGQSKSPFFQLFKRNKANSSNFADSMLKLVRTLPKVLKYLPSDKAQDARLYILSLQFWLGGSPDNLQNFLKMIAGSYVPALKGAGIKYDDPVLYLDSGIWHPLAPTMYEDVKEYLNWYGTRRDANDRLKDPKAPIIGLVLQRSHIVTGDDGHYVAVIMELEAKGAKVIPIFAGGLDFSGPTQRYLVDPITGKTFVNAVVSLTGFALVGGPARQDHPKAIAALQKLDVPYIVALPLVFQTTEEWLNSTLGLHPIQVALQVALPELDGKSHALHKRVEQLCTRAIRWAELKRKTKEEKRLAITVFSFPPDKGNVGTAAYLNVFSSIYSVLSDLKKDGYNVEGLPDTPEALIEEVIHDKEAQFNSPNLNVAYRMNVREYQSLTSYASLLEENWGKPPGHLNSDGENLLVYGKQYGNVFIGVQPTFGYEGDPMRLLFSKSASPHHGFAAYYTFVEKIFQADAVLHFGTHGSLEFMPGKQVGMSDACFPDSLIGNIPNIYYYAANNPSEATVAKRRSYANTISYLTPPAENAGLYKGLKQLSELISSYQSLKDTGRGPQIVSSIVSTAKQCNLDKDVPLPEEGEELPPKERDLVVGKVYAKIMEIESRLLPCGLHVIGEPPSAIEAVATLVNIAALDRPEDGITSLPGILAATVGRDIEDVYRGSDKGILADVELLRQITEASRGAITAFVEKTTNSKGQVVNVANNLSKILGFGLSEPWVQYLSATKFVRADREKMRVLFGFLGECLRLVVQDNELGSLKLALEGSYVEPGPGGDPIRNPKVLPTGKNIHALDPQAIPTTAALKSAKIVVDRLLERQKADNGGKYPETVALVLWGTDNIKTYGESLAQVLWMIGVRPVADTFGRVNRVEPVSLEELGRPRIDVVVNCSGVFRDLFINQMNLLDRAVKMVAELDEPAEMNYVRKHAQEQAEELGVSLREAATRVFSNASGSYSSNVNLAVENASWTDEKQLQDMYLSRKSFAFDSDAPGAGMKEKRKAFELALATADATFQNLDSSEISLTDVSHYFDSDPTKLVQGLRKDGRAPSSYIADTTTANAQVRTLSETVRLDARTKLLNPKWYEGMMKSGYEGVREIEKRLTNTVGWSATSGQVDNWVYEEANSTFIEDEAMRKRLMDTNPNSFRKLVQTFLEASGRGYWETTEENLDRLRELYSEVEDKIEGIDR

SEQ ID NO: 103 - protein, 248 aa, Zea mays
MATPSSSLCSSFASLRTASIGHPRGIASSTPRKAFHVKAVEVAGCDWIHVDVMDGRFVPNITIGPLVVDALRPVTDLPLDVHLMIVEPEQRVPDFIKAGADIVSVHCEQTSTIHLHRTVNQIKSLGAKAGVVLNPATPLTAIDYVLDVVDLVLIMSVNPGFGGQSFIESQVKKIAELRRLCAEKGVNPWIEVDGGVGPKNAYKVIEAGANAIVAGSAVFGAPDYAEGMVSSQSIKGIKTSQRPLAVAA

SEQ ID NO: 104 - protein, 458 aa, Zea mays
MALTTASTVSSPSRIIRRFSSSQDSRPPSSLLHLAPRRGPGNSPRACSWHRLVVRRMGWAARALLGGLSDAGASESDEEEEHVLRVGQREGEIDDAVELSAAAVGPERWDVLGLGQAMVDFSGMVDDEFLDRLGIEKGTRKVINHEERGRVLRAMDGCSYKAAAGGSLSNSLVALARLGSSQSAGYPELNIVMGGSVGSDPLGSFYRAKLRRANVHFLSKPVKDGTTGTVIVLTTPDAQRTMLAYQGTSSTLSYDSDLASLVSKSNVLIVEGYLFELPHTIEAIKQACEDAHKNGAIIAVTASDVSCIKRCYNDFRDIVRNYADILFANANEARALCELPSTDSPMSATRYLSHSVPLVSVTDGMHGSYIGVKGEAIYIPPPQCVAVDTCGAGDAYASGILYGVLRGASDLKGIGLLASRVAAVVVGQQGTRLRVQDADRLAGSFEHHLDSLEFCSDV

SEQ ID NO: 105 - protein, 369 aa, Zea mays
MRGPWASSALSLRLRLRGARARTNTSPMSSTAARVVHPAAAAPPPPRPRRLAPARCAAGSATDTATAGPTRVTTVSNRGDSLAICRVLNGMWQTSGGWGRIDRDAAVDAMLAHADAGLSTFDMADHYGPAEDLYGMFINRIRRERPPEFLEEVKGLTKWVPPPVKMTRSYVEDNINRSRKRMDVTALDMLQFHWWEYSNPGYLDALKHITDLKEEGKIKTVALTNFDTDRLQIILENGIPVVSNQVQHSIVDMRPQQRMAELCQLTGVRLITYGTVMGGLLSEKFLDTNVSIPFAGPPLNTPSLQKYKRTSVAGSMVGVRLGLSEHIKDTNAIFSLELDEEDMNIITEVSKRGRNLIDIIGDCGDEYRA

SEQ ID NO: 106 - protein, 902 aa, Zea mays
MVPSGQHNPMGPGQQVGASLLRTSSSLLGGGAGAGAGGQPGMGMGVGVLPSQSPFSSLVSPRTQYGGVGGGNGLLAGASSVASMLSRQQSYGNGGTGVMPGSGAGLPIGGLQHRGGLDGVGDLVGTGGPDSMAFSSSGPGSLGNQLGVDSLQQQQQLDAPQDSQNQQEHQQQMSMTYNQQHMMSQTQQQQQPAVKLENGGVLGGVKLEQQMGQPDQSVSAQMLRSSSGGVKLEPQLQALRSLGAIKMEHQSSDPSVLLQQQQHMLQLSKQNPQAAATQLSLLQQQQRFLQLQQQQQQQQILKNLPLQRNQLQQQQQQQQQQQQQQLLRQQSLNMRTGKSAAYEPGTCAKRLTHYMYHQQNRPQDNNIEYWRNFVNEYFAPSAKKRWCVSLYGNGRQTTGVFPQDVWHCEICNRKPGRGFETTVEVLPRLCQIKYASGTLEELLYVDMPRESQNSSGQIVLDYTKAIQESVFEQLRVVREGHLRIVFNQDLKIASWEFCARRHEELIPRRSIIPQVSQLGAVVQKYQSSVQSSASLSSQDLQNNCNSFVACARQLAKALEVPLVNDLGYTKRYVRCLQIAEVVNCMKDLIDHSRQTGSGPIESLHKFPRRGNSGVSSVQAQQQSEEQKPVPQNSNQSGQNSAPATGMQVSASGNGDATSNNSLNFAPSTSAPSSSVVGLLQGSVNCRQDHPTSSGNGLYNGGNSGPVAKANSTNSMQSNAPASFPLPAPSASNGNMMPAPQHSSQMNSPTMSSNLPPMQTPASRPQEPEPIESQSSVQRILQDLMMQSHINGVGPVGSDMRRANTITPGMNGVNSLVGNPMTNNPGINGMGFAAMGGLGQQMRTAMGNNALAMNGRTVMNHSAHDLTQLAHQQQQRDLGNQLLGGLRAANSFNNLQYDWKPAQ

SEQ ID NO: 107 - protein, 415 aa, Zea mays
MALPPSSSPSSLSAASAQPTPLHLHLPTKAPGRLPLLPFSRAALPPPLRLRIARTSLSPGTPLPRALLPPPSASADAAASDVGGGGAGFGGHDDDGHNHHGGEGGGDDGGHGDDAGHGDDAPGGGDARGEALFVLAQLGRKLDSLPSDLAAAVDSGRIGADIVRRFTELEANGFFRWLLQFQGFRERLLADELFLTKLGIECGIGLVAKTVAEFQKRGDNFFKEIEVVISDVVMAIVADVMLVYLPAPTIGLQPPLARNAGAIANFFYNCPDNTFQIAMAGRSFSLLQRIGAFVRNGIKLLAVGTTASLIGTSVTNAALKAKRAVDKDLEDEVMEIPVVSTSVAYGVYMSISSNLRYQLLAGVIEQRMLEPLLHNQKLLLSAMCFIVRTGNTFLGSLLWVDYARWIGVQKSHEEA

SEQ ID NO: 108 - protein, 256 aa, Zea mays
MASAATATLPKVQLRPRCNSYFQVRPVLALPLPSRKFSSSVALLIRSNMPSTLRLLVSAGGRRTFLPVSAVGSGQGSSVTEADRKSDLSLENVKTSVVSRDGEKINVRVQLPGKATQKVFDEALTFLARDAPPVPGFRKSKGGKTSNNQLSRDCAVSVLQIPSSILLQMLGKSRVTKFVLQEILSITIEEFVKKENLKVKPEIQTTQSEGEMESAFAPGSAFGFNVVLQLETPDSDDPEEKPGSDDDLQEESGSSE

SEQ ID NO: 109 - protein, 599 aa, Zea mays
MNLRTFGSMCGDNGVTVGSGSESGIQTQKCTKSKGANESGNNSGSNDDEAGMGLNARDDSDNGSGTQAQNSWTKLAVEIDSPQAMSLDQLADPANSTCAQVIHSKSEICSHRWLPGSSNRNCKKQKYTNDDFKGKDLEIDGPGNLYMDHQSSPNERPIKAADHENNSKESMMGNLGDATVRAADLIGSMAKNMDAQQAARAADTPNFSSEVPEGKDDFKGKDLEIGGPRNLYMDHQSSPNERPIKAADHENNSKESMIENLEEPTVRAADLIGSMAKNMDTQQAARAAEDTPNFSSKVPEGKVTTFIARYHTSAASNQGGTGLVGSCSPHDNSSEAVKTDSTYNMKSNSDAAAIKQGSNGSSNNNDMGSTTKDVVTKPSTNNERVMLPSAIKANGYTSTFHPVQQWMVPDNATAGKAKADEVANNAGRNSHPGDVQSNLTQQHRPTLHYVHFENSGSGALQCGSSNVFDPPLEGQATNNYGVKAGSNSGSNKGQNNGSTAGASTAAANAGRTDTEIRAIDKSGPGGGSGSGNDTYVRRLAASMTPRQEQLKKYREKKKDRNFGKKVRYQSRKRLADQRPRVRGQFVKQAVQNQEGDGER

SEQ ID NO: 110 - protein, 446 aa, Zea mays
MAVTITWVKARQIFDSRGNPTVEVDVGLSDGSYARGAVPSGASTGIYEALELRDGGSDYLGKGVLKAVSNVNNIIGPAIVGKDPTEQVEIDNFMVQQLDGTSNEWGWCKQKLGANAILAVSLAVCKAGAMVKKIPLYQHIANLAGNKTLVLPVPAFNVINGGSHAGNKLAMQEFMILPTGASSFKEAMKMGVEVYHNLKSIIKKKYGQDATNVGDEGGFAPNIQENKEGLELLKAAIEKAGYTGKVVIGMDVAASEFFGEKDKTYDLNFKEENNDGSKKISGDSLKDLYKSFVSEYPIESIEDPFDQDDWSTYAKLTDEIGQKVQIVGDDLLVTNPTRVAKAINEKTCNALLLKVNQIGSVTESIEAVRMSKRAGWGVMASHRSGETEDTFIADLSVGLSTGQIKTGAPCRSERLAKYNQLLRIEEELGDAAVYAGAKFRAPVEPY

SEQ ID NO: 111 - protein, 443 aa, Zea mays
MARLVLSECCGLAPLRRLRAGRGAIAAPSPPALSAAPRRRPASASIHRDWALRVSAPTRLASAAVEEDKPSAAPGQEEGAAAGGEFDPGAPPPFGLAEIRAAIPKHCWVKDPWRSMSYVLRDVAVVLGLAAAAARLDSWLVWPLYWAAQGTMFWALFVLGHDCGHGSFSNNPKLNSVVGHILHSSILVPYHGWRISHRTHHQNHGHVEKDESWHPLPERLYKSLDFMTRKLRFTMPFPLLAFPLYLFARSPGKSGSHFNPGSDLFQPTEKNDIITSTASWLAMVGVLAGLTFLMGPVPMLKLYGVPYLVFVAWLDMVTYLHHHGHEDKLPWYRGKEWSYLRGGLTTLDRDYGWINNIHHDIGTHVIHHLFPQIPHYHLIEATEAAKPVLGKYYKEPKKSGALPWHLFRVLAQSLKQDHYVSDTGDVVYYQAESKTSTSALKSD

SEQ ID NO: 112 - protein, 356 aa, Zea mays
MSVAVLRVRAMELLARPAAAASSSCARPSLQLPAPGTSRPRRPGFPTLRAAAAAAAAIAAEPQSNEQQNIIMETEVFACPVCYEPLMRKGPPGINLPAIYRSGFKCSKCNKSFTSKDIFLDLTVTAGTKEYSEQKPARTELFRSPLVSFLYERGWRQNFNRSGFPGLDEEFQMAQDYFQPIAGGILLDVSCGSGLFTRKFAKSGTYSAVIALDFSENMLRQCYEFIKQDDSLLNVNLALVRADISRLPFASCSVDAIHAGAAIHCWPSPSNAVAEISRVLRPGGVFVGTTFLSSPRNNPFSVEALRPLRQIVGPVNTSYNYFTEGELEDLCKSCGLVNYSSNVQRSFIMFSGQKPY

SEQ ID NO: 113 - protein, 1062 aa, Zea mays
MEAASCCRVFSTQRCRFPLRRLSAPPWPQPFCTESSGGLVTPSASKRRSRGPVMAAKKAAEGEKQEDGKYKHTVDLPKTTFGLRANSVQREPELQKLWDDNQVLKRVSERNTGTAFVLHDGPPYANGDLHMGHALNKILKDFINRYKLLQNHKVSFVPGWDCHGLPIELKGKFIFLKSMDKETLSALTPIKLRQKAAKFAKATVDAQMKSFKRYGVWADWDNPYLTLSPEYEAAQLEVFGQMVMKGYIYRGRKPVHWSPSSRTALAEAELEYSENHISRSIYAAFKITNPSKSGMLDDFFPNVSLVIWTTTPWTIPANAAVAVNPKLIYAVAEVQSVFESESTSGGKQRKVGNILSSEKGKLFVIVASDLITTLESKWGVKLVVHKSFPGSALEHCRYAHPVNSNECSVILGGDYITTESGTGLVHTAPGHGQEDYITGLKYGLPIISPVDDEGNFTAEAGQFGGLSVLGAGNAAVVKYLDEQYSLILEEPYKHKYPYDWRSKEPTIFRATEQWFASVDGFRDAAMDAIRRVTWVPSQAQNRIVAMTSSRSDWCISRQRTWGVPIPVFYHVDSQEPLITEETIEHIKAIVLKKGSDAWWYMTTEELLPDRYRDKASEYRKGTDTMDVWFDSGSSWAAVLAKRDGLNFPADIYLEGSDQHRGWFQSSLLTSIATTGKAPYSSVITHGFVLDEKGFKMSKSIGNVVDPEKIIVGGKNHREEPGYGADVLRLWVSSVDYTTDVLIGPQILRQMSDMYRKLRGTMRFLLSNLHDWKPDNSVPYNDLPKIDKYALFHLETVMTSMKDSYESYQFYKVYQILQRFATVGLSNFYLDVAKDRLYVGGRVSFTRKSCQTVLMAHLLYLVRAISPIMPHLAEDVWQNLPFQYTLQDGSLANFVFDLKWPEKNEEWLSAPKDDVDFLGVILELRSEVNKILENARTGKLIGSSLDAKVYLHTESSDTVLKLKELSSASNDADALHRLFITSQVDILPILNEEITSSVPYTGKFSNPRTGVIWIGVTRADGAKCERCWNYTQDVGSFHDHPTLCVRCYGVIELQTQPAAAAVS

SEQ ID NO: 114 - protein, 140 aa, Zea mays
MAATALSMSILRAPPPCFSSPLRLRVAVAKPLAAPMRRQLLRAQATYNVKLITPEGEVELQVPDDVYILDFAEEEGIDLPFSCRAGSCSSCAGKVVSGSVDQSDQSFLNDNQVADGWVLTCAAYPTSDVVIETHKEDDLL

SEQ ID NO: 115 - protein, 319 aa, Zea mays
MRAASSTVYPVYLSLHRHPNSHQASFRPSRANHDNTHKCTKPPKVLRRSLFSLPASFLLLHTSSSLAVDDANMPSTSTIDTTITDRIFMDFSVCPSYFRSDRPLGAELSSCPDSEPLGRVVFGLYGRLLPVTTANFKATCTAAAYRGTLVHKLLQGQFFAAGRQGPRHDKGEVQPPSGLVRNSETVNPKAFELRHARPGTLSLCLGQNDDDDDIKLNPNYHNLEFLVTTGPGPCPELDGQNIVFGTVLEGMDVITSIATIPTYKPAERIRLFNGFAQLIGDGRAQTARAMWDRPLKTVYISDCGELTVTKPSLSPPSLP

SEQ ID NO: 116 - protein, 359 aa, Zea mays
MAAILARAGVIATAGKGFSGRRRGNGIVVAAVTKTGAAVPQEGALERPAWSGETTLSRLVGALIAFKPLYAVLKLASREVIIRTAEKSNIPWREMTKEVLESDVYEVFERIQDPNLVYPDYYLNPFHAYDEGNLSWLAAAEAEPATMSIAKRAIPEATSIEEANQIVRGNWLNVIEEHHLKYSGNCQVNDILDIGCSVGVSTRYLAEKFPSAQAVGLDLSPYFLAVAAQKEEKLSRPKPIRWVHANGEATGLSSDSFDLVSLAYVCHECPARAITGLVKEAFRVLRPGGTIALTDNSPKSKVLQELSPVLFTLMKSTEPFLDEYYMLDLEETMRKVGFVNVCSVLTDPRHRTVTATVPY

SEQ ID NO: 117 - protein, 394 aa, Zea mays
MATSSTALLHLVIPASRRRRHLVPRAAHSESAPPAASVDRRRFIAHTAAAAAVSPLVLPRWTPAARADEAPALSEWERIFLPIDSGVVLLDIAFVPDDPSHGFLLGTRQTILETKDGGNTWFPRSIPSAEDEDFNYRFNSVSFKGREGWIIGKPAILLHTSDAGESWERIPLSAQLPGNMVYIKATGEQSAEMVTDEGAIYVTSNRGYNWKAAVQETVSATLNRTVSSGISGASYYTGTFNTVNRSADGRYVAVSSRGNFYLTWEPGQPFWQPHNRAVARRIQNMGWRADGGLWLLVRGGGLFLSRGTGITEDFEEVQVQSRGFGILDVGYRSQEEAWAAGGSGVLLKTTNGGKSWMRDKAADNIAANLYSVKFLDDRKGFVLGNDGVLLRYLG

SEQ ID NO: 118 - protein, 144 aa, Zea mays
MAASASTVSGLAGASLASRPAFSTSFTRGSRVSARNPLMSRNLERNGRITCMTFPRDWLRRDLSVIGFGLIGWMGPSSVPAINGNSLTGLFFSSIGQELAHFPTPPPVTSQFWLWLVTWHLGLFIVLTFGQIGFKGRTEDYFEK

SEQ ID NO: 119 - protein, 385 aa, Zea mays
MASTSLATLPSQLASPVRLRRRAALSSASRPHFLLHRATKGGSQCRLAVTCNAQAVAPTSFAQGTPVRPTSILVVGATGTLGRQVVRRALDEGYDVRCLVRPRPAPADFLRDWGATVVNADLSKPETIPATLVGIHAVIDCATGRPEEPIRTVDWEGKVALIQCAKAMGIQKYVFYSIHNCDKHPEVPLMEIKYCTEKFIQDSGLDYIIIRLCGFMQGLIGQYAVPILEEKSVWGTDAPTRIAYMDTQDVARLTFIAMRNEKANKKLMTFAGPRAWTTQEVITLCERLAGQDANVTTVPVAVLRFTRQLTRCFQWTNDVADRLAFSEVLSSDTVFSAPMNETYQLLGVDGNDILSLEKYLQDYFTNILKKLKDLKAQSKQTDIFF

SEQ ID NO: 120 - protein, 626 aa, Zea mays
MAATMGSISANGSYQTNRPSALKQAPHMQFQQCCNGGLRFLSKHSQSTRSKIQVAKRRATDNGIHPKTTGHRAPIVCSAGMTIVFVATEVHPWCKTGGLGDVVGGLPPALAAMGHRVMTIAPRYDQYKDAWDTSVLVEVNIGDTVETVRFFHCYKRGVDRVFVDHPMFLEKVWGKTGAKLYGPTTGTDYRDNQLRFCLLCLAALEAPRVLNFNNSEYFSGPYGEDVVFVANDWHTAILPCYLKSMYKPNGIYKNAKVAFCIHNIAYQGRFARADFDLLNLPDSFLPSFDFIDGHVKPVLGRKLNWMKAGIIESDLVLTVSPHYVKELTSGPDKGVELDGVLRTKPLEIGIVNGMDVYEWDPSTDKYISVKYDATTVTEARALNKESLQAEVGLPVDSSIPVIVFVGRLEEQKGSDILIAAIPEFVGENVQIIVLGTGKKKMEEELTQLEVKYPNNARGIAKFNVPLAHMMFAGADFIIVPSRFEPCGLIQLQGMRYGVVRLPSSALLQQFRFFVTIPICSSTGGLVDTVEEGVTGFHMGSFNVECETVDPADVTAVASTVTRALKQYDTPAFHEMVQNCMAKDLSWKGPAKKWEEVLLGLGVEGSRAGIDDAEEIAPLAKENVATP

SEQ ID NO: 121 - protein, 466 aa, Zea mays
MQTPTMSTSMATTAPAKPPAPPRQCCRYLLLPSTGHRRSVAAWSAKKKNPWLDPFDDGPDEEFDYQGMFSGGKQEEDPRPPEDPENPYGFLRFPQGYNPELDSLASKVRGDVRRACCVVSGGVYENVLFFPVVQMLKDRYPGVLVDVVASARGKQVYEMCKNVRYANVYDPDDDWPEPAEYTHMLGVLKNRYYDLIISTRLAGIGHALFLFMSSARDKVGYVYPNVNSVGAGLFLNEMFKAPTNNLADGGYHMYKDMLEWIGRPAKNVPQQPTQPLRVSISKKLRAYVEDKYSRAGVEKGKYVVIHGIASDSVANMKSRGDDDCLLPLGHWAQIAKEISSGDRGLKPLFVIPHEKHRDEIEEEVGDDTSILFITTPGQLTCLINDSAGVVATNTAAVQLANARDKPCVALFSSAEKARLFLPYVEGKSSCTVISSATGNLIDIDLNAVKNVVKDLEPAPSFALAQK

SEQ ID NO: 122 - protein, 480 aa, Zea mays
MASAAAPPTSLSLAARAATRAAAAAAAPLRRGGLATACQPARSLAFAAGDARLAVHVASRCRQAFSGRGTRAMATMAKKSVGELTEADLEGKRVFVRADLNVPLDENQNITDDTRIRAAIPTIQYILSKGAKVILSSHLGRPKGFTPKFSLAPLVGRLSELLGIQVQKADDVIGPEVEKLVAALPNGGVLLLENVRFYKEEEKNDPEFAQKLASLADLYVNDAFGTAHRAHASTEGVTKFLQPSVAGFLLQKELDYLVGAVSSPKRPFAAIVGGSKVSSKIGVIESLLEKCDILLLGGGMIFTFYKAQGLPVGASLVEEDKLELATSLLAKAKEKGVSLMLPTDVVIADKFAPDANSQIVPASAIPDGWMGLDIGPDSVASFNAALDTTKTVIWNGPMGVFEFDKFAVGTEAVAKKLAELSGKGVTTIIGGGDSVAAVEKVGVADVMSHISTGGGASLELLEGKELPGVVALNEAATVTV

SEQ ID NO: 123 - protein, 209 aa, Zea mays
MAARCSTAASVVRTGSRDLSPSFSFTAAALPSARLRPVGAWVRGGGYTCRLRAVCAMGSAPSSSQSPSPHTPSGQTQGKADYKSLSEEEWKKRLTEEQYYVTRQKGTERAFTGEYWNTKTPGIYQCVCCDTPLFQSSTKFDSGTGWPSYYKPIGENVKSKLDMSIIFMPRTEVLCATCDAHLGHVFDDGPPPTGKRYCINSASLKLKPQ

SEQ ID NO: 124 - protein, 158 aa, Zea mays
MAPPAVSISPICCVPYPASGPRRARTPPSSLRRFPRFAARRSSGGGGGTRPEPKPDDNESKAVLDAFFLGKAFAEALTERVESVVGEVFSVVGQWQAEQQKQVQDFQEEVVQRAQKAKEKAATEVSDDKGAKSLREPSATIVATTTTSSPPATPTQTE

SEQ ID NO: 125 - protein, 242 aa, Zea mays; identical to SEQ ID NO: 25

SEQ ID NO: 126 - protein, 148 aa, Zea mays
MDPAASGRFDKLQSSFKLSIQCLLTACSREDVNDAFSSFTDAEKERLHRMLTLVAAALEKIDDFVEKQNLDALSSEKTTVEEIEEKVSRAKKDEIEYLTGLLKKVEESNNAKKARIELLKKEEDLTAARDVLNKMTQWNSALVENINP

SEQ ID NO: 127 - protein, 473 aa, Zea mays
MAALKASFRGELSAASFLDSSRGPLVQHKVDFTFQRKGKRAISLRRTCCSMQQAPPPAWPGRAVAEPGRRSWDGPKPISIVGSTGSIGTQVKGFIEYSSLIFHLLHNAKTLDIVAENPDKFRVVALAAGSNVTLLADQVKTFKPKLVAVRNESLVDELKEALADCEEKPEIIPGEQGVIEVARHPDAVTVVTGIVGCAGLKPTVAAIEAGKDIALANKETLIAGGPFVLPLAHKHKVKILPADSEHSAIFQVTHKMDWPVDRLKDVKVADALKHPNWNMGRKITVDSATLFNKGLEVIEAHYLFGAEYDDIEIVIHPQSIIHSMVETQDSSVLAQLGWPDMRLPILYTLSWPDRIYCSEVTWPRLDLCKLGSLTFKAPDNVKYPSMDLAYAAGRAGGTMTGVLSAANEKAVELFIDEKISYLDIFKVVELTCNAHRNELVTSPSLEEIVHYDLWARRYAASLQPSSGLSPVPA

SEQ ID NO: 128 - protein, 604 aa, Zea mays
MAASALASRALRPPHGRHPPAPSPRPRPRSATAAAPRTRCRAVAADERPADPAFPERQNRGISGLRLLIASQLSTRAVERPEADVVVIGSGLGGLCCAGLLARYGQDVLVLESHDRPGGAAHSFDIKGFNFDSGPSLFSGFQSRGPQANPLAQVLDALGESVPCASYDSWMVYVPEGQFLSRIGPTEFLKDLEMFVGVDAVQEWKKLLDAVIPMSAAAMALPPLSIRGDLGIISTAVGRYTPSLLKSFIQMGPQGALGATKLLRPFKEIVDSLELKNPFVRNWIDLLCFLLAGVKSDGALSAEMVYMFAEWYKPGCLLEYPLGGTGAIIDALVSGIEKFGGRLALRSHVEKILIENGRAVGVKLQSGQVIRAKKAVVSNASMWDTLDLLPPDAVPKSYEDRVKATPQCESFMHLHLGFDAENAREDLGIHHIVVDDWNKGVDGEQNVVLISVPSVLSKDLAPPGKHILHAYTPGTEPFSLWEGLDRKSAEYRRLKEERSEVMWKAVELALGPKFSREKCDVKLVGTPLTHRRFLRRNRGTYGPAIKAGEATFPGQATPIPQLFCCGDSTFPGIGVPAVAASGAIVANTLVPVSQHSELLDAVGI

SEQ ID NO: 129 - protein, 291 aa, Zea mays
MASSVAAAASTFLGTRLADPAPQNGRIVARFGFGLGGKAKPAPKKVAKTSTSSDRPLWFPGAVAPDYLDGSLVGDYGFDPFGLGKPVEYLQFELDSLDQNLAKNEAGGIIGTRFESSEVKSTPLQPYSEVFGLQRFRECELIHGRWAMLATLGALSVEWLTGVTWQDAGKVELVDGSSYLGQPLPFSISTLIWIEVLVIGYIEFQRNAELDPEKRLYPGGSYFDPLGLAADPEKKERLQLAEIKHARLAMVAFLGFAVQAAATGKGPLNNWATHLSDPLHTTIFDTFGGSS

SEQ ID NO: 130 - protein, 251 aa, Zea mays
MAAAAAAATSFTTLAVARSAGQRSLLASKAAPSPLLSLRGARIPSQAVSFSGGLAASPSHSRARFATSASAEPKEADLQSKITNKVYFDISIGNPVGKNVGRIVIGLYGDDVPQTAENFRALCTGEKGFGYKGSSFHRVISDFMIQGGDFDKGNGTGGKSIYGRTFKDENFKLVHTGPGVVSMANAGPNTNGSQFFICTVKTPWLDGRHVVFGQVVEGMDIVRLIESQETDRGDRPKKKVVISECGELPVV

SEQ ID NO: 131 - protein, 133 aa, Zea mays
MAALGTAITPAAATTAPCCYNRHPRSHITARRNRVASARRLDLCASSSPAVTAPDIPDEALVFEMAKTYLKPTIGGTIVDASCGSGLFSRLFIKSGLYSLVVALDFSENMLKQCNQYIKQENISDEYAFGHYV

SEQ ID NO: 132 - protein, 413 aa, Zea mays
MAAAATTSSSSHLLLLSRQQAASLRCRLSFLGQPARRSGRVTAQAPAAKDVRCMAAVDTAASAAAAETSPKSSSYEIVTLTTWLLQQERTGAIDNEMTIVLASISTACKQIAALVQRAPISNLTGVQGAVNVQGEDQKKLDVVSNEVFSNCLKSSGRTGVIASEEEDVPVAVEQSYSGNYIVVFDPLDGSSNIDAAVSTGSIFGIYNPNDECLADVDDNDTLDSVEQRCIVNVCQPGSNLLAAGYCMYSSSVIFVLTVGTGVYVFTLDPMYGEFVLTQEKVQIPKAGKIYAFNEGNYALWDDKLKLYMDSLKEPGDSGKPYSARYIGSLVGDFHRTLLYGGIYGYPRDKKSKNGKLRLLYECAPMSFIVEQAGGKGSDGHQRILDITPTEIHQRVPLYIGSVEEVDKVEKFLA

SEQ ID NO: 133 - protein, 213 aa, Zea mays
MAMAMGHRQSGSCAKVRPGGIGIGIGMGMVSKQHQRTPPPSSYCLHLHHILYLRPVASSHHLTRHSVDVTKDDKPLEPLPPAAAETESTQQQEDEDGGPKLDPRRFEEKFAVLNTGVHECQSCGYRYDQAAGDPSYPVPPGLPFAQLPDDWRCPTCGAAQSFFESKSVEIAGFAQNQQFGLGGNSLTSGQKGLLIYGSLLIGFLFFISGYFLQ

SEQ ID NO: 134 - protein, 162 aa, Zea mays
MLGLPAAPPAAAAPPNPKGKGRCSAAPPPAMTGRVSLAVPAAAVSLSLFLWSSPVNAGILSGFSGLESTPGPDLPRLEFLEKWNAENQKKYTEFDNRFKKSKVLQDLLEKSRKNKEKNERMIQDKYCLRGAEWGVGDCSTEGMSDQEREDFISELKKRAGAE

SEQ ID NO: 135 - protein, 283 aa, Zea mays
MAALAPSKILGTQLNFAGSSRYATAAPTAGAQKIVSLFSKKPAQKPKPAAVSSSSPDISDELAKWYGPDRRIYLPDGLLDRSEVPEYLTGEVPGDYGYDPFGLGKKPEDFAKYQAYELIHARWAMLGAAGAVIPEACNKFGANCGPEAVWFKTGALLLDGNTLNYFGNSIPINLVVAVIAEVILVGGAEYYRITNGLDLEDKLHPGGPFDPLGLASDPDQAAILKVKEIKNGRLAMFSMFAFFIQAYVTGEGPVENLAKHLSDPFGNNLLTVISGAAERTPSL

SEQ ID NO: 136 - protein, 259 aa, Zea mays
MAVAAAAHHLPVVPHRLVPVRHTSSSPPPHPASRCSAAGKPPVQLHAAQARASGFAARVAFNPSGNYDLSLSMGEDETPQVQPPPPPTQGRFEIVINNDNIRTLDLSPVEAALGDLSSLTPAASRTLLDQTVGFTISYEREDEYDTRELSEFPDIRLWFVRLDAAYPWFPVVLDWRAGELARYAAMLVPHQMSMRMGVVFNPEALELFVMKKVFAVDAWLKQQSHPKPRLKTADMARMLGFGVGDELFDLIEKYPVHRS

SEQ ID NO: 137 - protein, 359 aa, Zea mays
MRTLLPVAAGRGTVACAATPVPRRSLLLSTAAAGAALQPEQVAGTRPLRLTRSEASAVAKPRTSADEAISWAKKDNRRLLHVVYRVGDLDKTINSSARPCWSDDPITQCRFYTECLGMKLLRKRDIPEEKYSNAFLGYGPEESHFVVELTYNYGVDKYDIGEGFGHFGIAVEDVAKTVELIRAKAGKVIREAGPVKGGETVIAFVEDPDGYKFEIIERPGTPEPLCQVMLRVGDLDRAISFYEKACGMELLRKRDSPEYKYTVAMMGYGPEDKDAVLELTYNYGVTEYAKGNAYAQIKQIAIGTDDVYRTAEAAKLSGGQVVREPGPLPGINTKITAILDPDGWKLVFVDNMDFAKELE

SEQ ID NO: 138 - protein, 285 aa, Zea mays
MQALLLPARAAPPTPAMLRQRAVSASACASQVCRPLFGAASCISCGVHGSVRRHLTVAVAAAPPSPSSSPSSGPLYPTPPPTEQEVERVKLEQVMRRLEKTARYFKNLGTLGFWSQLVCTIISAGILAFSTVVTGKVTSPFTFYATAAGIAAAFISVFWSFGYIRLSERLRKTSKEPAKAPPRADVVKSLKNGIVVNILGMGAAVLGMQATVGALVAKALTTSAVPYYQAAGQSPVLALDVFLVQASANTILSHFLGVASSLELLRSVSLPPAEAAVPAPAPARA

SEQ ID NO: 139 - protein, 409 aa, Zea mays
MSALGTLSGGAAGVSGLLRLRRRAAPAPAIAAPSHLPAGTVKCAAAVPDAAPIVWGRQLRPALLLPAALLPSLQPARRHTLQPPAAAAESAGEAKSVGFLEKYPALVTGFFFFMWYFLNVIFNILNKKIYNYFPYPYFVSLIHLVVGVVYCLISWSVGLPKRAPINGTLLKLLFPVALCHGIGHITSNVSFAAVAVSFAHTIKALEPFFSAAATQFILGQQVPFSLWLSLAPVVIGVSMASLTELSFNWTGFINAMISNISFTYRSIYSKKAMTDMDSTNVYAYISIIALIVCIPPALIFEGPKLMQHGFSDAIAKVGLTKFVSDLFLVGLFYHLYNQIATNTLERVAPLTHAVGNVLKRVFVIGFSIIVFGNKISTQTGIGTSIAIAGVAMYSYIKAKIEEEKRKKSA

SEQ ID NO: 140 - protein, 283 aa, Zea mays; identical to SEQ ID NO: 26

SEQ ID NO: 141 - protein, 603 aa, Zea mays
MAALQPSFSPAMTLKSSCSALKFPKTALLSGFGGIPRLQDAQDRNTSVAYLIPKAASVTDHEIIHEESGHVLKVPFRRVHLTGDQKHFDTYDTSGPQNISPRIGLPKIRKEWIDRREKLGSPRYTQMYYAKQGIVTEEMLYCASRENLSPEFVRTEVARGRAIIPSNKRHLELEPMIVGRNFLVKVNANIGNSAVVSSIEEEVHKLQWATMWGADTVMDLSTGRHIHETREWIIRNSPVPIGTVPIYQALEKVNGIAENLSWEIFRDTLIEQAEQGVDYFTIHAGVLLRYIPLTAKRMTGIVSRGGSIHAKWCLTYHKENFAYEHWDDILDICNQYDVALSIGDGLRPGSIYDANDSAQFAELLTQGELTRRAWAKDVQVMNEGPGHIPMHKIPENMEKQLEWCNEAPFYTLGPLTTDIAPGYDHITSAIGAANIGALGTALLCYVTPKEHLGLPNRDDVKTGVISYKISAHAADLAKGHPYAQAWDDALSKARFEFRWLDQFALSLDPVTAMAFHDETLPSEGAKVAHFCSMCGPKFCSMKITEDIRKYADENGYGTVEEAVIQGMNAMSAEFLAARKTISGEQHGEAGGEIYVPESYAAQK

SEQ ID NO: 142 - protein, 1108 aa, Zea mays
MDLSRFASGVGPSRVAPRAGLQIGAAENGFRACSLRRARHRGGGNGNLTAAASTLRGRGGLFYLAPTRRSHPSLRLFYLLPTRGSHLSLRARWRPRCQGNDSLAYVDGPLETAKGSGEVDDNVPTSSGSDDDRGLADVDGLREMLQRSRNELEVARVNSTMFEEKAQRISESAIAFKDRADGAQRDVCAAVATVQEIISKEADAKEAVQKATMALSMAEARLQLAAEALEANRGSVGPTEVSIEGMEQEALLSAQEEIKDCRAALSRCAEELSRVQDKKMELQKEVDRLTDLAGKAQMDASNAEEDVANIMVLAEQAVALEMEASQRVNDAEMVLLKAEKAIASIDTVVELPSPAEEQRSTEEDSVSEGYEYSSDVTDDVYVRDEVSSIERLMVGDLTVQGFEQLEPSREIYDEESSNKMSVEPQKEAESDSDKSKQGKKQEMERKEHTKEPLSAPKALVKRSSRFFSASFFSSKVDGEFTPTSVFRGLMKSVQKQAPKLVVGILLLGAGAFFLNRAEKSQLFQQQGIATSIGKVTSTTKPIVLEIRRIPQRVKKLIELLPHQEVNEEEASLFDILYLLLASVIFVPLFQKIPGGSPVLGYLAAGVLIGPYGLSIIRNVHETKAIAEFGVVFLLFNIGLELSVERLSSMKKYVFGLGSAQVLATTAAVGVIAHCFAALPGPAAIVVGSGLALSSTAVVLQVLQERGESTSRHGRATFSVLLFQDLAVVVLLILIPLISPNSSKGGVGFQAIAEAMGMAAVKAVAAITAIIAGGRLLLRPIYKQIAENQNAEIFSANTLLVIFGTSLLTARAGLSMALGAFLAGLLLAETEFSLQVESDIAPYRGLLLGLFFMTGLLSPQLTSLLFLVVGISMALTPWLAAGGQFLASKFEQHDVRSLLPVESETDDLQDHIIILGFGRVGQIIAQLLSERLIPFVALDAGSDRVAAGRALDLPVYFGDSGSREVLHKIGAERACAAAITLDTPGANYRAVWALNKYFPNVKTFVRAHDVDHGVNLEKAGATAVVPETLEPSLQLAAAVLAQAKLPMSEIQETINEFRNRHLSELTEVCNYLCATSGSSLGYGFSRATSKSKSFTSDDENQTVDGTLAI

SEQ ID NO: 143 - protein, 237 aa, Zea mays
MAAVGIPSPPAPHVFAPAASPSSSTYSTLAPRRLRLSTRLGLAAAAASCRTRCAAAADGGAAASEGASAVAELEGDPDAGTDVAGGAATSTRPPYSLISADNVQKAMRGLAITDADHYGRLGVTRLASTDEVKAAYEKMCEELNSKELEEEELNKEHELLKESFTILSTEEERRLYDWSLSRSGQPERYVWPFEVDPLELAPDPPKEPEDEFPTKLVGYFLLAWFILSVGLSVALNK

SEQ ID NO: 144 - protein, 659 aa, Zea mays
MSTVAPAPSAADQTTNLLQKLSLEGKDGSDTAKKPSGMPYGGSTHAGDAQSAASQVDRSITPLLQEAMDPNFFYQPSAYASPAYYFPSGYDGSANEWDSRYAGHEGMEMPPTVYGDMYLGYGYAPYGPYPSGSPVPTVGHDGQSYGSQQYQYPSQYYQQPTPTNAKHGLNGASSQPEPPSVASQQARVLVDATKATPNVRANGMTIAHNSSLPRKQTHLNVSVANSGLYGRGPMQGSGPSASNYGHNGVRSPAQWYDGPVYSNGHQIPTASSTSYRSNSSSMRSQSQHPTTNLMGIHAQMPSSGMGLTSPRYPSRMYPDNRLYGQYGQYGNTLKGGLGFGSNMYSSRNNGRWGVVDTKYKPRGRAPFGFSGENQDGFTELNRGPRSGGFKHQKQFGPTVTIAVKGQALPSVGKQNSTLPDKGQFNQEGFPLTYKDAKFFVIKSYSEDDVHKSIKYNVWASTPNGNKKLDAGYREAQEKSSDCPVFLFFSVNTSGQFVGVAEMVGPVDFDKTVEYWQQDKWNGCFPLKWHIVKDVPNNTLKHITLDNNDNKPVTNSRDTQEVKLEQGLEMLKIFKEHVTKTSILDDFGFYENRQKLMQEKRANQQLLQGQGADVSQEKDKDATNGKPGSQKQATSKEGTPAEVAADASKPVAESGISNDN

SEQ ID NO: 145 - protein, 241 aa, Zea mays
MDVVSNDKGQMSGVHLKRRDTGEESVLTVKGLFYGIGHTPNSQLLQGQIELDSAGYILVKEGSAKTSVDGVFAAGDVQDHEWRQAITAAGSGCIAALSVERYLVANDLLVEFHQPVQEETKKDITDKDVQMGFDISHRKHKGQYALRKLYHESPRLICVLYTSPTCGPCRTLKPILSKVIDEYGEFVHLVEIDIEEDPEIAEAAGIMGTPCVQFFKNKEMLRTVSGVKRKKEYREFIEANK

SEQ ID NO: 146 - protein, 316 aa, Zea mays
MRELSCFGDGSVSVATADAAVSGRGALDRALQAATTSVYRAALSSGKEVLVRVTWTRSAAGEAGVAVAFDFDDDGGGGTSDAPKPSPARTRPPVLLLHKRRGSRSLVTGAGTAVGVHWDTAEAKYPSPSSPEPERDYCLAVVADAELALLLGAGGAARELSRRLGLAPSARAAPALLVSRREQLRCAAAAAAAHVTRCRFREGGDEHEVAVHACRGGEGELRVTIDGEKVTEVRRVGWGFRGNRAAVLPDGEVVDVMWDVHDWWFGGRGGGSAGSGAQFMVKARAEKEGRLWMADDTAATEQSPGGFFLHVQCYRR

SEQ ID NO: 147 - protein, 139 aa, Zea mays
MASTNMASATSRFMLAAGVPTASSGSGRVSFASAPNRLGRRLVVRADEESPAEPAPTAEGEGAVATKPKAEKPPPIGPKRGAKVKILRRESYWYNGIGNVVTVDQDPNTRYPVVVRFNKVNYAGVSTNNYALDEILEVK

SEQ ID NO: 148 - protein, 493 aa, Zea mays
MDPYKHRPSSAFNAPYWTTNSGAPVWNNDSSLTVGARGPILLEDYHLVEKLANFDRERIPERVVHARGASAKGFFEVTHDITHLTCADFLRAPGVQTPVIVRFSTVIHERGSPETLRDPRGFAVKFYTREGNWDLVGNNFPVFFIRDGIKFPDMVHALKPNPRTHIQDNWRILDFFSHHPESLHMFSFLFDDVGIPADYRHMDGSGVHTYTLVSRAGTVTYVKFHWRPTCGVRSLMDDEAVAVGGANHSHATKDLTDAIAAGNFPEWTLYIQTMDPEMEDRLDDLDPLDVTKTWPEDAFPLQPVGRLVLNRNIDNFFAENEQLAFCPGLIVPGIYYSDDKLLQTRIFSYSDTQRHRLGPNYLLLPANAPKCAHHNNHYDGSMNFMHRHEEVDYFPSRYDAVRNAPRYPIPTAHIAGRREKTVISKENNFKQPGERYRAMDPARQERFITRWVDALSDPRLTHEIRTIWLSNWSQADRSLGQKLASRLSAKPSM

SEQ ID NO: 149 - protein, 112 aa, Zea mays
MACSTNLCFSASIPPLPASSSSSVSSPFLTVERVSYVPSLSRWTIRYKQLGHAYQRSHVLAFASADASQGKRSSGENVVMVDPLEAKRLAAKQMQEIRAKEKLKELMTPAME

SEQ ID NO: 150 - protein, 104 aa, Zea mays
MTVSIRIAVEMEIIEIQDHPFTQQQLPACKTILATQTHDLGGDNVFGSCRPLHNGLVSLMHWSGKGKPWDRLDAGKPCALDHTWKAYDLYIGENDSSSASASSG

SEQ ID NO: 151 - protein, 231 aa, Zea mays
MPAAMAAAAAQRLLAASTKIIGVGRNYIAHAKELGNPVPKEPVLFLKPTSSFLHAGVATAAVEIPEPLESLHHEVELAVVISRRGRDVPEASAMDFVGGYALALDMTARDLQSVAKSAGLPWTLAKGQDTFTPISAVVPKSAVTNPDDLELWLKVDDELRQKGPTSDMLFKIPFLISYISSIMTLMEGDVILTGTPEGVGPVRVGQKITAGITDLIDVEFDVQRRNRSFST

SEQ ID NO: 152 - protein, 791 aa, Zea mays
MDCLQKGCGLVFLKMTMKHSTSGTMRLVCQRSGYRGWVQKITFGLVAQLDLVDLALKFIMISILREDHQMCCLQDLGDDSRFIEFYNLVFMQYNKKDDGSLEPLKQMNIDTGMGLERMARILQKVPNNYETDLIFPIIEKAASMAMVSYAKADDATKTNLKIIGDHMRAVVYLISDGVIPSNIGRGYVVRRLIRRVVRMGRLIGIRGDGHGNSEGAFLPSLAEVVISLSTEIDSDVESRRRSILGELQREEMRFVQTLERGEKLLAELLDEALLNAGNNGNKPSLSGKNVFLLYDTYGFPVEITAEIASEQGVTVDIEGFDIEMENQRKQSQAAHNVVRLSVGNETEIVKNIPDTEFLGYDSLSASAVIKGLLVNGNPVNEVSQGSEVEILLDRTPFYAESGGQVGDNGFLYVNGGEDRRQTTVIEINDVQKSLGNIFVHKGMIKQGSVEVGKEVDASVDAKLRQGAKAHHTATHLLQSALKSVVGSETSQAGSLVAFDHLRFDFNFHRPLSEEELTTIEALINQWIGNAAHVETKVMALQDAKNAGAIAMFGEKYGEQVRVVEVPGISLELCGGTHVSNTAEIRGFKIISEQGIASGIRRIEAVAGDAFVDYVCARDNYMRRLCLSLKVKAEDVNSRVETILEELRATRNVASSLRSKIAVLKAASLASRATTVEPQNVRIVVENMGDVDADGLKSAAEYLIDTLKDPAAVILGSSPGDGKVSLVAAFSPAIVEMGLQAGKFVSGIAKLCGGGGGGKPNFAQAGGRKPENLPDALEKARAEIVARVSGSS

SEQ ID NO: 153 - protein, 249 aa, Zea mays
MPPAFAAAPSSSICGVRIPTVRRFEAQSTVSTPRFMRNRVAAKTRSTSAWSLKAGLWDSLRSGLLKNNSSTETVEPPPAPLEVEEPLPVEIVLLERTLPDGSTEQILFSSAGDVDVYDLQALCNKVGWPRRPLSKIAASLRNSYLVATLYSIIRSSETEGEEKKQLIGMARATSDHAFNATIWDVLVDPSYQGQGLGKALMEKVIRTLLQRDINNITLFADNKVIDFYKNLGFEVDPQGIKGMFWYPRF

SEQ ID NO: 154 - protein, 233 aa, Zea mays
MSFFLQVMKALIDMEALQPTGDLSPVRRSIQFFLDNLLSQTPDQQQTLAAIGEDLFAIAQDQPFRFPSTFTFVIRAFSTLEGIGYILDPEFSFVKVAAPYAQELLDLKQRRQTGPQLVQEIRKQANDARDSTISMPYRIQRIEDFVGQLETGDLKLRVRVLESERAARKATVLQMATMYTALGGTLLNVGVTLNSQGNQIIANGSFIGAGIFLALLVRSMQRVKKLDKFETMI

SEQ ID NO: 155 - protein, 316 aa, Zea mays
MVASTASRLSPPRFSTPSPSLHPPNRRSRFSPVRAAKLEAVLSIGAHLIPHPRKAASGGEDAFFANSDAGGVFAIADGVSGWAEKNVNPALFSRELMRNSSNFLNDEAVSHDPQILLMKAHAATSSIGSATVIIAMLEKTGTLKIASVGDCGLKVIRKGQVMFSISPQEHYFDCPYQISSEAEGQTYKDALVCSVNLMEGDIIVSGSDGLFDNIFDQEIVSIISESPSVDEAAKALAELARKHSVDVRFDSPYSMEARSRGFDVPWWKKLLGGKLIGMHKLYTKGHVQGGDTEEQKGNEQGAAAVVAYKMNDEEVA

SEQ ID NO: 156 - protein, 1225 aa, Zea mays
MIIDAIDWLVLSTTEKVRNIYDDLFEVPSKVMQTAITPRDATSSINFYWNSKGSSLGYIPVFHFSEVLQAGAGVVRQFNININGKRFTSHDYYTPRHLESGYVYGTRPYTNQIRYNVSIVKTDTSTLPPIINADEIFIVISTTNVGTDSEDGTWDGLTCSYAISDPPKITALNMSFSGLTGDISSAFANLKAVQSFYADNPDLCTNAGDSCQTAPQGKSKLVIYYVAVPMALIVVALAVLLCCLLRRRKTRGLADVSVKPRDKTPTSLASMAADEHRLSSLRLENRRFTYEDLEMITDSFKRVIGRGGFGYVYEGFLEDGTQVAVKMRSQSSNQGAKEFLTEAQILTRIHHKNLVSMVGYCKDGVYMALVYEYMSEGSLQEHIAGKRLTWGQRLRIALESAQGLEYLHRGCNPPLIHRDVKTSNILLNAKLEAKVADFGMSKALDRDTYASTNTLVGTPGYVDPEYLETMQPSTKSDVYSFGVVLLELVTGRPPILHSPQPTSVIQWARQHLARGDIEVVVDASMGGNHDVNSVWKAAEVALQCTEQASAQRPTMGDVVAQLLECLDLEKGRSANESFCDGDDSGSATASLSHSSAFVTGRIFGTVPMVETGPATRRALVCVSLSPLSPLPRARLPSAPPWDESAFLAMAASHLPPAATLVKKYPTLLHPFGAKPHAQRLIFRCRATSSEGADDGWASFVDELKRSLQVDPSDAVISNAGAGLTSNNDLVTALPLEPSAGPAAGDATTAAAGAVSELLGVDASGAVATPDRLLSSLLHLDASNPVASVAGGALSRLDALTSGLSDAQRWALFGFLAATWLYLTARPGVLSGAVDMYVLAPLQLALDSVLGRRSLKMSDFVVGERIGEGSFGVVYAGAVVPKNGAVVEERSGKAKTSLQNDDRYKEKVILKKIKVMTVGAKECGDYEEWFNYRVSRAAPESCADFLGSFVADKNKAEFVKGGKWLVWKFEGDRTLANYLSERGFPSNLERLMFGRVLQGLGPLEREALVVKQVMRQLITSLKRIHATGIVHRDIKPSNLVVTRRGQVKLIDFGAATDLRIGKNYVPDRALLDPDYCPPELYVLPEETPEPPPEPIAAILSPILWQQQPSLQLNSPDLFDMYSAGIVLMQMAIPTLRTQSGLKNFNAELRSAGYDLNRWRQSARRRPDLQILDLDSGRGWDLATKLISERGANGGGRLSAAAALRHPYFLLGGDQAAAVLSKFSLSK

SEQ ID NO: 157 - protein, 206 aa, Zea mays
MRSCSSARQMLLTRLSSVSCSSTAQQLHAGVGKFAAAACWSWKKKREELPCFRARLAGKPPRASPAKGGIVPASDDDDGVSLGTVKLPGNIDTARLESLLFQWGNSLCQGANLPLPVPLKISSPDAIDQVDKVEGGIRLGFVAVEDGATRTLVYIDCLVSPAPDGSGPVFRAIRNGPMKDKEPPGEPRIMRSLLQALEKSIQIARV

SEQ ID NO: 158 - protein, 424 aa, Zea mays; identical to SEQ ID NO: 27

SEQ ID NO: 159 - protein, 318 aa, Zea mays
MASSAFLNALVLRSPSPSLSSSSNRRSTGAFAFPNPPRFPCLRSARRLVLARAAAAPAPGDGPEDEWGPEPEGGSAVTGAAVAEAPEAREVAELKAQLKDALYGTERGLRASSESRAKVLELITQLETRNPTPAPTEALTLLNGKWILAYTSFSQLFPLLGFGNLPQLVKVEEISQTIDSENFTVQNCIKFSGPLATTSVATNAKFEIRSPKRVQIKFDEGIVGTPQLTDSIVLPEKFELFGQNIDLSPLKGIFSSIENAASSVAKTISEQPPLKIPIRTNNAESWLLTTYLDEELRISRGDGSSIFVLFKEGSTLLY

SEQ ID NO: 160 - protein, 203 aa, Zea mays
MCDLVARTGRHLQRYENGRRLVAGCIPFRYRDINDGASDDEQKKLVEVLMISSQSGPGLLFPKGGWENDETVEEAAAREAIEEAGVRGDLVSSYLLPHVLTPQHFTDGALLCFVHKATAGVLRFQEQAARSNVQSRNLRPAREGRASLLARTEHPAEELAHRSRGGGAEPLPVDAGGPRDRLLRLARELEKRWWRRRRLRGPN

SEQ ID NO: 161 - protein, 147 aa, Zea mays
MALQAPSLMRAPAAQRSAPPRPSFSAPWSLRLPAPARRRVATAARITMRVASKQAYICRDCGYIYNDRTPFDKLADNYFCPVCGAPKRRFRPYEPAVSKNANATDARKARKEELKKEESMGKALPIAIVVGIIALAGLYFYLNNVYS

SEQ ID NO: 162 - protein, 227 aa, Zea mays
MATSAALSTAANPTQLCRSRAALGKPVKGLGLGMGRERASQRSITCQAASSIPADRVPDMEKRKLMNLLLLGAISLPTVGMVVPYGAFFVPAGSGNGGGGTYAKDKLGNDITVEEWLNTHGPNDRTLAQGLKGDPTYLVVEQDKTLATYGINAVCTHLGCVVPWNGAENKFICPCHGSQYNNQGKVVRGPAPLSLALVHADVDDGKVLFVPWVETDFRTGQDPWWSA

SEQ ID NO: 163 - protein, 568 aa, Zea mays
MTSLLLPPPQAAAAAYGCCHCLLLASTTVPARSGCVGRASRITLALRCLPITGHRLRSRKVACQATTETEPEGNGDEEDKKEFGDDASSPSVYNVAEANGPGENDSSLDNKKDETTNAEAALLSSGDTVQDMDADATSTNGIQENVEVIEVASGSPLPGMKQQLDDSVRIPKATIDILKDQVFGFDTFFVTSQEPYEGGVLFKGNLRGKPAKSYEKITSRLQNKFGDEYKLFLLINPEDEKPVAVVIPKQTLQPETTGDKNLSVPSVASVVLRVIPLYEEENIYSLKYLVCKKPQLSTPSSSKPYTYRSTFDNLELLKDGLSGALVTGLIIGVHEIGHILAARESGIKLGVPYFVPSWQIGSFGGITRIVNIVRNREDLLKLAAAGPLAGFSLGFVLLLLGFVLPPSDGLGLVIDPTVFHESFLVGGLAKLLLGDVLKEGTQLSINPLVLWAWAGLLINAINSIPAGELDGGRIALAMWGRKVSSRISSLAIGLLGVAALFNDVAFYWVVLIFFLQRGPIAPLSEEITDPENSYIGIGAAILLFGLLVCLPYPFPFDPSQLTDMDFNF

SEQ ID NO: 164 - protein, 295 aa, Zea mays
MEVGFLGLGIMGKAMATNLLRHGFRVTVWNRTLAKCQELAALGATVGETPASVVSKCRYTIAMLSDPSAALSVVFDKDGVLEQIGSGKGYVDMSTVDAATSTKISEAVKQKGGAFLEAPVSGSKKPAEDGQLVILAAGDKPLYDGMIPAFDVLGKKSFFLGEIGNGAKMKLVVNMVMGSMMNSLSEGLCLADKSGLSPQTLLDVLDLGAIANPMFKLKGPTMLQGSYSPAFPLKHQQKDMRLALALGDENAVAMPVSAAANEAFKKARSLGLGDQDFSAVYEVVKGAGGSGSGQP

SEQ ID NO: 165 - protein, 475 aa, Zea mays
MAERLAASLLPAASPSPSARRATVAAAAAASFPSPCSARAGLRLRSRPPLFSQKAAGRGCGLRVVRCMAASDAVQLKAAREDIKELLKSTYCHPIMVRLGWHDSGTYDKNIKDWPQRGGANGSLRFDAELSHGANAGLINALKLIQPIKDKYPGITYADLFQLASATAIEEAGGPKIPMKYGRVDVTAAEQCPPEGRLPDAGPRDPAEHLREVFYRMGLDDKEIVALSGAHTLGRARPDRSGWGKLETKYTKDGPGEPGGQSWTVEWLKFDNSYFKEMKLFFLNEIQDMKFLSQLPWKEQKEQDLLVLPTDAALFEDPSFKIVLALTENLWHIQVYAEKYAEDQEAFFKDYGEAHAKLSDLGAKFDPPEGFSLDDDTCSSPSDEKTEEPTLVAVGAAVATATADDNNGAAPQPEPFIAANYSYGKRELSDAMKQKIRAEYEGFGGSPDKPMQSNYFLNIMILIAGLAFLTSLLGN

SEQ ID NO: 166 - protein, 364 aa, Zea mays
MGAIGIVVRACAPLAPAAAAAPAPSGSSSRDAAQAQRWSKPTRTGRVLVLGGTGRVGGSTATALSKLRPDLGILVGGRNRFDREKGESIAAKLGGQSEFVQVDTRNAGMLEEALQGVDLVVHTAGPFQRAEECTVLQAAISTKTPYIDVCDDTDYSWRAKGFHEQAKAAGVPAITTAGIYPGVSNVMAAELVHAARSENGEPERLRFFYYTAGTGGAGPTILTTSFLLLGEDVIAYNKGEEIKLKPYSGALNIDFGKGVRKKNVYLLNLPEVKSAFKILGVPTVSARFGTAPFFWNWGMQAFANFLPVEFLRDRNKVQKLVQSVDPLVRAVDGIAGEHVSMRVDLDCSNGRNTIGLFTHKKLSV

SEQ ID NO: 167 - protein, 221 aa, Zea mays
MEASLAAAAVGLFPPPRIRIRITKSSPLPRHRCLQSGPSKIWTSGSRACLVAASASTPPAPGGGLYSAATYELTPENVDRVLDDVRPYLISDGGNVTVVAVEDGVISLKLEGACGSCPSSTTTMNMGIERVLKEKFGDAFKEIRQVFDGDQPAAETTAEAVNRHLDILRPAIANYGGSVDVLAVDGEDCLVRYDGPESIGSGIKAAIKEKFPDITSVVFTL

SEQ ID NO: 168 - protein, 210 aa, Zea mays
MATTAFLPPAKLPLQGRRFASPKTAGRISVRVPPARAQQEQQVKEEEAEVASVPPPQDAEKQARKGDAQSLPRQPLAESKNMSREYGGQWLSSTTRHVRIYAAYIDPVTNAFDQTQMDKLTLMLDPQDEFAWTDEACQMVFNEFQDLVDHYEGAELSEYTLRLIGSDLEHYIRKLLYDGVIKYNMRSRVLNFSMGKPRIKFNSNQIPEKI

SEQ ID NO: 169 - protein, 239 aa, Zea mays
MSRAATRFFLTRCLLPLPLLSPRWRQRRRGSICATRAFAMAASGFGGGEAFRLSAAPGAGLLKLHKGDITLWSVDCATDAIVNAANERMLGGGGVDGAIHQAAGPELVQACRKVPEVKPGVRCPTGEARITPAFELPASRVIHTVGPIYDLDKHPEVSLKKAYENSLKLAKDNGIQYIAFPAISCGVYRYPPKEASKIAVSTAQKFSEDIKEVHFVLFSDDLYNIWRETAQQLLSQFEK

SEQ ID NO: 170 - protein, 198 aa, Zea mays
MELCVSTTASVRATAAPISFAPPRRGASASTALPLHRRIPTRGWCCASAAVPDPAPSEELASASYTVVVADKPDSPADDKVDEVSAAPSGSAEAPVAEPVSSEASPSPSTDDGGLDEILSKLNIEVTPILILTGSGAFVALWILSSVVSAVDSVPLLPKLLELVGTGYSIWFTARHLLFKESRDGMFAKFKDIKERII

SEQ ID NO: 171 - protein, 402 aa, Zea mays
MAAASWSAPTTSFAPAPAPPWGRWRTKAAPLPIRTLPRRVLLNAVGESAMVAAGDTLLGLYEKERLGLLQYADDESKEERYWETLDADLRYWTRSLRPVQWYPGHIAKTEKELKEQLRLMDVVIEIRDARIPLSTSHPKVILLVIAIFICTKEQLQIVLSHVMYDQMDSWLGNRKRIIVLNRKDMISTEDMNAWATYFGNQGIKVVFSNGQLGMGTMKLGRMAKSVASVANTKRKEKGLLPRPVRAGIVGYPNVGKSSLINRLLKRRMCPAAPRPGVTRELKWVRFGTDLELLDSPGILPMRISDQTSAIKLAICDDIGERSYDFADVAAILVQMLIRHPAVGSEAFRRRYKIDVDSECGKTFVTKLSVHLFNGDTSQAAFRILSDYRKGKFGWVALERPPT

SEQ ID NO: 172 - protein, 1102 aa, Zea mays
MASDSDVDEDELLQIALQEQAARDLSHQRPPAANKPVVNLVRPPAPNARGGNGRAGGAAAKARQPSRGGDEDEDSDVELLSISSGEEDDNPRARGPPPPRGGGGGRAGARRAVARDDGDFDDEEPRSWKRVDEAELARRVREMREAKVAPNIQELDQKAAAAAAAARKALTSVQTLPKGVEVLDPLGLGVIDNKSLRLITDASVSSPISREKSQGLDPNMRDKVIYSSPSFDPKVFLSWVHKDTSAADLEAGALTLKTDLKGRTQQKKQLVKENFDCFVSCKTTIDDIESKLRQIEEDPEGAGTAHLYSVTQKISGVANRAFEPLFERQAQAEKIRSVQGMLQRFRTLFNLPSAIRGNIRKGEYDLAVREYQKAKSIVLPSHVGILKRVLEEVEKVMQEFRGMLYKSMEDPHLDFAENSRIHGLFEKCTQDHELRMEVLQNKIREKVLSDSKWRQLQQDSNKSLEVDSAICDSPRADQLSTNFMAEEADSLRATYTRRLTSVLIQHVPAFWRLALSVFSGKFAKTASGNVVSDSDMNAKPSANKNDDKGGDVKYTNHTLDEVASMVRDTISAFDTKVQSTFRDFEECNILCPYMSDTIKEIAKACQTLEGKDSSPTAVKLLRTLHFQMTKLYVLRLCSWMRATTKEISKDDTWVILSTLERNKSPYAISCMPLEFRDIIISAMDRIDTMILNLMSETAKSYDISQPLQEINESVRLAFLNSFLDFAGYLERFGGELTENRPNNENNYVQNGYINGTRETSANTDGDLHKKLLVVLSNIGYCKAELSEELYTTYRHIWSPVRNNDERSSDMRDLMTSFSALEEKVLDQYTFAKVLTPSNPLQFLSQPEELAVKDRILSNLIRSSAQSYLLDPGIYWGAAPMVKSIRDATLDLLHILVAVHAEIYSGARPLLEKTMKILVEGLVDIFLSVFHENKTKGIRLLDANGFCQLMLELEYFETVLHTYFSPEAQQAMKSLQENLLEKACESIAEAMENPGHQRRPTRGSEDASSDDRQPSVSPDDLLLLAQQYSSDLLQGELERTRLNIACFMESALQSTSAPAGSKPAAYSSYHAQVPQHAPIQTSSPSFRRQQTGTSSPVVSRRRR

SEQ ID NO: 173 - protein, 327 aa, Zea mays
MAPPAAPTALHHRTPLLLPRRTVALGATATARAARAASLAVRAQPDTTAAAVSTSAPEPAPEFKPPPGFKAPEPKRYEVKSGQVGSVLGASLAIPLRLGTGVFVLGYSPSLVSPSEIPSDQYALEFGAWKVKEESKIGQCKRPEKPIEIYEFEGCPFCRKVREMVTVLDLDVLFYPCPQKGPTFRPKVLEMGGKKQFPYMVCRRDGTVPIMLSLGLLTAITAGLATLGRIGKGNSYIASKVPPQPIEIWACEGSPFCKLVRETLVELELPHLLHSCARGSPKRQEFFKKKGLFQAPYIEDPNTGVQMFESAEIIDYLKATYALYPSS

SEQ ID NO: 174 - protein, 437 aa, Zea mays
MAPLGLFLLLCFCSHLFRCSPDLALPVLHANSGNKNAFKTLIAAEYSGVKVELVKDFQMGVSNKTPEFLKMNPIGKIPVLETPDGPVFESNAIARYVTRLKADNPLYGSSLIDYAHIEQWIDFAATEIDANIGKWLYPRMGFYPHAGVVEESTIAALKRALGSLSTHLASNTFLVGHSVTLADIVMTCNLCMGFSRILTKSFTSEFPHVERYFWTMVNQPNFKKVIGDVKQAEAVPLVPQKAAPAKVQKPKETKKEAPKPKVTEKSAEEEEAPKPKPKNPLDLLPPSKMILDDWKRLYSNTKTNFREVAIKGFWDMYDPEGYSLWFCDYKYNDENTVSFVTMNKVGGFLQRMDLCRKYAFGKMLVVGSEPPFKVKGLWLFRGSEIPKFVMDEVYDMELYEWTKVDLSDEAQKERVNAMIEDQEPFEGEALLDAKCFK

SEQ ID NO: 175 - protein, 237 aa, Zea mays
MAPSPILVRPPALANSPLPPPRCVAAVAAAPAVRTAPAAPFSRLRTKCRFAASDIVVLGGSGFVGSAICRAAVSKGIEVVSFSRSGRPSYSDPWVDQVNWLPGVPKFILISVHDYNLPSFLLTSGYFTGKRKAESEVLSKYPASGVVLRPGFIYGKRKVNGFEVPLDAVGQPLEKLLSSVENFTKPLSSLPASDLILAPPVSVDDVAYAVINGVIDDSFFGVFTIEQIKEAASKVRV

SEQ ID NO: 176 - protein, 446 aa, Zea mays; identical to SEQ ID NO: 110

SEQ ID NO: 177 - protein, 460 aa, Zea mays
MALPSMSLVAKGVLPFSARTSSGVTQRPVSVTASLEHKTSDARRKFLKLALGNLGVGLPTLLGAKKALADEQGVSSSRMSYSRFLEYLDKDRVKKVDLFENGTIAIVEAISPELGNRVQRVRVQLPGLSQELLQKLREKNIDFAAHSNQEDSGSLLFNLIGNLAFPLILIGGLFLLSRRAQGGLGGPNGPGFPLAMRTPGFSGADLANLLNEAAILAGRRGRTAISSKEIDDSIDRIVAGMEGTVMTDGKSKSLVAYHEVGHAICGTLTPGHDPVQKVTLVPRGQARGLTWFIPMDDPTLISRQQLFARIVGGLGGRAAEEVIFGEPEVTTGAAGDLQQITGLAKQMVVTFGMSEIGPWSLMEGGAQSGDVIMRMMARNSMSEKLAEDIDSAVKQLSDEAYEIALRHIRNNREAIDKIVEVLIEKETVTGDEFRAILSEFAEIPVENRVPPATPAAALPA

SEQ ID NO: 178 - protein, 290 aa, Zea mays; identical to SEQ ID NO: 86

SEQ ID NO: 179 - protein, 304 aa, Zea mays
MAAAPSSLVSSHLSRLADLRRAAAPATPTVPQQLRVGFSRRRAQRVVAMAGSGKFFVGGNWKCNGTKDSVSKLVSELNAATLETDVDVVVAPPFIYIDQVKNSLTGRIEVSAQNVWIGKGGAYTGEISAEQLVDIGCQWVILGHSERRHIIGENDEFIGKKAAYALSQNVKVIACIGELLEEREAGKTFEVCFEQMKAFADSISNWADVVIAYEPVWAIGTGKVATPEQAQEVHAAVRDWLTTNISPDVASSTRIIYGGSVNAANCAELAKKEDIDGFLVGGASLKAPDFATIINSVTAKKVAA

SEQ ID NO: 180 - protein, 1079 aa, Zea mays
MAGNEWINGYLEAILDSRTSSGGGGGGGGGDPRSPVAGASPTKGASPRGPHMNFNPSHYFVEEVVKGVDESDLHRTWIKVVATRNARERSTRLENMCWRIWHLARKKKQLELEGIQRISARRKEQEQVRREATEDLADDLSEGEKGDTLAELVPVEAAKKKFQRNFSDLTVWSDDNNEKKLYIVLISVHGLVRGENMELGRDSDTGGQVKYVVELARAMSMMPGVYRVDLFTRQVSSPDVDWSYGEPTEMLCSGSNDGEGMGESAGAYIVRIPCGPRDKYLKKEALWPYLQEFVDGALAHILNMSKALGEQVGNGRPVLPYVIHGHYADAGDVAALLSGALNVPMVLTGHSLGRNKLEQLLKQGRMSKEEIDSTYKIMRRIEGEELALDASELVITSTRQEIDEQWGLYDGFDVKLEKVLRARARRGVSCHGRFMPRMVVIPPGMDFSNVVVHEDIDGDGDSKDDIVGLEGASPKSMPPIWAEVMRFLTNPHKPMILALSRPDPKKNITTLVKAFGECPPLRELANLTLIMGNRDDIDDMSAGNASVLTTVLKLIDKYDLYGSVAFPKHHNQADVPEIYRLAAKMKGVFINPALVEPFGLTLIEAAAHGLPIVATKNGGPVDITTALSNGLLVDPHDQNAIAQALLKLVADKNLWQECRRNGLRNIHLYSWPEHCRTYLTRVAGCRLRNPRWLKDTPADAGADEEEFLEDSMDAQDLSLRLSIDGEKSSLNTNDPLSSDPQDQVQKIMNKINQSSALPPSMSSVADGAKNATEATGSTLNKYPLLRRRRRLFVIAVDCYQDDGRASKKMLQVIQEVFRAVRSDSQMSKISGFALSTAMPLSETLQLLQLGKIPATDFDTLICGSGSEVYYPGTVNCVDAEGKLRPDQDYLMHISHRWSHDGAKQTIAKLMATQDGSGDTVELDPASSNAHCFTFLIKDPKKVKTVDEMRERLRMRGLRCHIMYCRNSTRLQVVPLLASRSQALRYLFVRWGLYVGNMYLITGEHGDTDHEEMLSGLHKTVIVRGVTEKGSEGLLRSPGSYKKDDVVPSETPLAAYTTGEMKADEIMRALKQVSKTSSGM

SEQ ID NO: 181 - protein, 569 aa, Zea mays
MSVSSPAMASPPLAAPGTHRGPCFSTLCRLPSPSCYPPLSASSSPAISTVSAFAVLKHKPRGLGLRCQAAEEAPPPARGKTSLKVMISGAPASGKGTQCRMIVEKYGLVHISTGDLLRAEVSSGTEIGKKAKEYMDNGKLVPDQVVTDMVVSRLSQPDIQERGWLLDGYPRSFSQAQHLENLKIRPNIFIVLEVPDDVLIDRCVGRRLDPVTGKIYHLKNYPPENEEISARLITRSDDTFEKVKSRLDTYKQNSEAILPTYSDLLNKIDGNCPAEVVFQAIDFLLQKICENTSASKLTKTNGKRPDSADTGSKNEWRGIPTRLNNIPHSREIREYFYNDVLKATKLAIEDKKTRLQIDINIPELNPEMDVYRIGTLMELVRELSLSFADDGKRVKVCVQGSMGQGAFAGIPLQLAGTRKILEFMDWGDYGAKGTFINIGAVAEVGYRASTLFCMDMRAMTDAAGDRPVILVNPRLKDMPASSGVMQTMGRDIRLKYAASFETCYSFRLLYYAGSFYPIMGALRMAYPNKYEIYRRVDTLNGKENYILIAEFTNKPTPDEITSAFKGQKR

SEQ ID NO: 182 - protein, 676 aa, Zea mays
MPTVLSTRRAASPETISLPSSRSSHSRTASPLHPVSRGNRALRLLAALRSPSAPRPRLRRRPGLPPARAGLAAAAAMPAPETKARILVAGGGIGGLVFALAARRKGFEVLVLERDVSAVRGEGRYRGPIQLQSNALAALEAVDAAAADEVMDAGCVTGDRVNGIVDGVSGSWYIKFDTFTPAAERGLPVTRVISRMTLQQILARAVGDDAILNGSHVVDFTDDGSKVTAILEDGRIFEGDLLVGADGIWSKVRKTLFGHSDATYSGYTCYTGIADFVPPDIDTVGYRVFLGHKQYFVSSDVGAGKMQWYAFHKEEAGGTDPENGKKKRLLEIFDGWCDNVIDLVNATDEEAILRRDIYDRPPTINWGKGRVTLLGDSVHAMQPNLGQGGCMAIEDGYQLAVELENAWQESVKTGTPMDIVSSLRRYEKERRVRVAVIHGLARMAAIMATTYRPYLGVGLGPLSFLTKLRIPHPGRVGGRFFIKYGMPAMLSWVLGGNSSKLEGRPLSCRLSDKAHDELYRWFDDDDALEQAMGGEWYLFATSEANNNSLQQPIRLIRDEQRSLSVGSRSDANDSASSLSLPFPQISERHATITCKNKAFYLTDLGSEHGTWITDNEGRRYRVPPNFPVRFHPSDVIEFGSDKKAMFRVKVLNTLPYESARSGKQQGLQQEQVLQAA

SEQ ID NO: 183 - protein, 316 aa, Zea mays
MEIRAPPTSLSLAPPPASASFRRTPLRTFFLNGSVSLKVVQVRQSNVNRFKCNSIQSNLFDRLTRVARSYANAVLSSFEDPEKILEQAVLEMNDDLTKMRQATAQVLASQKRLENKYKAAEQASADWYRRAQLALQKGDEDLAREALKRRKSYADNASSLRSQLDQQKGVVENLISNTRVLESKIAEAKQKKDTLKARAQSAKTATKVSEMLGNVNTSSALSAFEKMEEKVMAMESQAEALGQLATDDLEGKFALLENSSVDDDLSQLKKELSGSSLKGELPSGRRAASNSGAGRPFPDLEIESELNELRRKAKEY

SEQ ID NO: 184 - protein, 162 aa, Zea mays
MAPIAVGDALPDGQLGWFDENDQLQQVSVHALAAGKKVILFGVPGAFTPTCSNQHVPGFITQAEQLKAKGVDEILLISVNDPFVMKAWAKTYPENKHVKFLADGSGAYTKALDLELDLTDKGLGVRSKRFALLADDLTVTVANIEEGGQFTISGAEEILKAL

SEQ ID NO: 185 - protein, 183 aa, Zea mays
MASPLLKSHSQLAAAAALHSVRRADRCPATIHLGKFHDHGLRSGRSKRSGSAKVGAFPSLDVVPLMVTMVEHVDMSRDYVVTKSIWHLSDAALKSVYTFYAMFTVWGVCFFASMKASDPFYDSETYRSQGGDGTVHWYYDRQEDLEASAREELLREELLEEIEQRVGGLRELEEASKEEQLTK

SEQ ID NO: 186 - protein, 1098 aa, Zea mays
MERVALLRTSGRRLLHRCRRGRPVVVPAAAASSLARRASSFSLPARGYSALPRGGARFLVAAAPLHCSGRYWPAAAPQLARRLSASAVSTSPSPVPYDTDDVHEYATKLGFEKVSEQTIDECKSIAVLYKHKKTGAEVMSVSNDDENKVFGIVFRTPPKNSTGIPHILEHSVLCGSRKYPLKEPFVELLKGSLHTFLNAFTYPDRTCYPVASTNTKDFYNLVDVYLDAVFFPKCVDDFQTFQQEGWHYELDNPEEEITYKGVVFNEMKGVYSQPDNIMGRVSQQLVQVQGLTFQNILQALSPDNTYGVDSGGDPNEIPKLTFEEFKEFHSKYYHPSNARIWFYGDDDPKERLRILSEYLDQFEANPAPNESKVWPQRLFKEPVRVIEKYPAGQEGDLTKKYMVCINWLLSEEPLDVETELALGFLDHLLLGTPASPLRRILLESGLGEAIVGGGVEDELLQPQFSIGLKGVSEDNIEKVEELVMQTLNNLAEEGFATEAVEASMNTIEFSLRENNTGSFPRGLSLMLRSIGKWIYDMDPFEPLKYEQPLQQLKARIAEEGSKAVFSPLIEKFILKNSHRVTVEMQPDPEKASRDEAAEKEILKQVKASMTQEDLAELARSTKELKEKQETPDPPEALKAVPSLSLQDIPKKPIHVPVEVGEINGVKVLQHDLFTNDVIYSEVVFDMGSMKKEHLQLLPLFCQSLLEMGTKDMDFVQLNQLIGRKTGGISVYPFTSSVRGKEDPLTRIIVRGKAMAPRVEDLFNLMYIILQDVQFTEQQRFKQFVSQSKARMENRLRGSGHGIAAARMDAKLNAAGWISEQMGGVSYLEYLRDLETKIDQDWDSISSSLEEMRKSLFSKNGCLINLTSDGKNLEKSRQHIAKFLDSLPSSPSIGSDPWLSRLPSVNEAIVVPTQVNYVGKAGNLYQSGYQLNGSAYVISKHISNTWLWDRVRVSGGAYGGFCDFDTHSGVFSYLSYRDPNLLKTLEVYDETARFLRELELDDDALTKAIIGTIGDVDAYQLPDAKGYSSLMRYLLGITDEERQQRREEILATSPKDFKEFADAVETIKDNGVVVAVASIDDVEAANKENPLFPEVKKCL

SEQ ID NO: 187 - protein, 335 aa, Zea mays
MAASPACAPGLISGPTLPPLPVAFRCYWAQKPSSASTSSRRPCRRRFVPVAAASTRTSSAAARGLDADDFRHPLDKQNTLLLRAIPGLNDVGKALLGPVSEQVMVLQNIGTSVLVSPNQLPDLHQLLVEAAKLLNTEAPDLYIRQNPVPNAYTLAINGKKPFIVVHTSLVELLTPRELQAVLAHELGHLKCDHGVWLTFANILTMGAYTVPGFGMVAGFLEEQLYRWLRAAELTCDRAALLVVQDPKVVISVLMKLAGGCPSLADKLNVDAFLEQARSYDKAASNPVGWYIRNAQTRELSHPLPVMRAREIDEWSRSQEYKTVMQKMFQMGLNRV

SEQ ID NO: 188 - protein, 377 aa, Zea mays
MATASLLEATRLLSTPRPPRRSLHTHLLRTPRLSALRAHLHRSATLDAQEPTARPGALLVLDALRRSVVDSLAALKRPALALLLAGALLAAASMGGPHAAALAASGGRVGGSAFSSRSSSPPSYGYSAPAPRGGYTAAPYYSPSPFVSFGPAVGIGFGGSGFLVTLIGFAAFLYLAGFLSDSSGGTSVLTETDKTTVLKLQVGLLGMARSFQKELDQIAEKADTSTPAGLSYVLTETTLALLRHPDCCISAYSSVDVKRSVDDGEKRFNQLSIEERGKFDEETLVNVNSIKRNKGGSQRSSGFSNEYIVITILVAAEGVHKLPVINSSNDLKTALQKMGAIPSSKILAVEVLWTPQNENDTLSERELLEDYPLLRPL

SEQ ID NO: 189 - protein, 465 aa, Zea mays
MAKALLYSSLLPGLPRAVGSSRSAAARLLLLPPLRLRRGRRAASACAVRAGLHGLDSVGGPHLQAALERAEAALYTLADAAVAAADAAAGAGDDAGQAAAAVQKNGGWFGFISEALEVVLKVLKDGLSAVHVPYSYGFAIILLTIIVKAATLPLTKKQVESTMAMQNLQPQLKAIQQRYAGNQERIQLETARLYRQAGVNPLAGCFPTLATIPVWIGLYQALSNVANEGLLTEGFFWIPSLGGPTTIAARQSGAGISWLFPFVDGHPPLGWYDTICYLVLPVLLVASQYVSMEIMKPPQIYGLAQSDDPSQKNTLLVLKFLPFMIGYFSLSVPSGLSIYWFTNNVLSTAQQVWLRKMGGAKPVVSEGDRRIITAGRAKRSNAQPAGERFRQLKEEESMRKVNKALAAGDSNASSSTYDMEDEESDDETTEEGGPVEEASSTGSDKKPPSYSGKKGKRSKRKRMVQ

SEQ ID NO: 190 - protein, 261 aa, Zea mays
MSLQYVAPPVRALAVLPAPGPPRRRTSHVSLYLPSRRPGLAVAPVRAAESSSPPTVPASAAGKAVVPDDEFSLAKVSFGVIGLGLGLSLLSYGFGSYFNLLPGSEWSALLLTYGFPLTIIGMALKYAELKPVPCITYADAFALREKCATPILKQVRSDVTRFRYGDEQHLDEALQRIFQYGLGGGIPRRNAPILQKIREEVTDDGKYSLVLVFEAKALELSDFEKRQAKFTSFFGPGIKAEIDAGKGGGDLYEVRLISDTV

SEQ ID NO: 191 - protein, 355 aa, Zea mays
MATVMAAAVSSFPSSSAVVAKASPASPCAAPHFRPRAVRAAIRAQASAVEAPATAKAKKESKKQEEGVVTNLYKPKEPYVGRCLLNTKITGDDAPGETWHMVFSTEGKIPYREGQSIGVIADGVDKNGKPHKVRLYSIASSAIGDFGDSKTVSLCVKRLIYTNDAGEIVKGVCSNFLCDLQPGDNVQITGPVGKEMLMPKDPNATIIMLATGTGIAPFRSFLWKMFFEKHDDYKFNGLGWLFLGVPTSSSLLYKEEFGKMKERAPENFRVDYAVSREQTNAAGERMYIQTRMAEYKEELWELLKKDNTYVYMCGLKGMEKGIDDIMVSLAEKDGIDWFDYKKQLKRGDQWNVEVY

SEQ ID NO: 192 - protein, 612 aa, Zea mays
MSPPAMLLPVCSAAPSCSPLCPVTASHVVARVARRVDVGAALRSYADSLVAQVPDRPPLADSSILSPYIAAPDDIARAFGAPASELPPLPSADPSPGLCCTGTDQPLAAVADLAATAVVNSAPTDAAERALSDAPFPSTFPSDASEVEDSVARLIDKVGKQVFQAEDALTEAYDKLRLSAYDALGAWRKTVRDAIGGLKASVDAGKQQAAGGVTDASGALHEKVAGAGTVAVDVLRKAIVAAEDSLGSAATFVVYSYGSAKESLPPNVRDLLSSSEEKASLVLRPIGNALQQVYVVVEGVEKNVGLDPSDPIVQLAVVLGGSVTIGTTYWLFTYSGYSGDLSPESAFDLLKNDDKAVLIDVRPEDLREKDGVPDLRLGARSKYASVASPEIKDPVKSMLKDEREFDDALLAVVIRNLKLVKGDSKVIVMDSNGARSKAIARLLKKLGVQRPYLVKGGFQAWSKNLRVKELKPETALTSINEDVEEILEQIKPTPTLVFGSLLGLSALSYALLEWEMTLQYIAVLSVGLTIYLRFSTYEDSEDLEKDLKLLLSPVRVGADALSWAAKKIEPNKVGLPTSPSTTAVKDRVLQAAAKHESQPSDADESSVQTAEA

SEQ ID NO: 193 - protein, 205 aa, Zea mays
MAPAPVAAPVASVSRAAAALAPAGAVRSARVASLHPFHSSTKIVLLPPRTGLLRSARQRRRLAARSSTSESSTDDSQSPKQEKAPFGYTRKDVLLIGLGVTAFGVGLKYGLELLGVDPLQAGNVVQLLVVLGMTVGWISTYMFRVANKDMTYAHQLRDYEKQVMEKRLESLSEAELQALLEQVEEEKQRVPQVPEEPNAITFRKK

SEQ ID NO: 194 - protein, 211 aa, Zea mays
MVLLILSCWLSWNHYIMSEVAFQGEDLIRESGIPYTIVRPCALTEEPAGADLMFDQGDNITGKISREEVARICVAALASPDAVGKTFEVKSTVPFSEPYVIDPANPPPEKDYEVYFKELKEGITVLAEEDGEYLEGAADGISIDMVAESPTVCPMKVVIAGSLDGVLVDKLPAAFSVVGGVSDDGVCGGGSPFEALLMADTGATMVAADLV

SEQ ID NO: 195 - protein, 165 aa, Zea mays
MAVVGVLALQGSYNEHMAALRRIGVKGVEVRKPEQLLGIDSLIIPGGESTTMAKLANYHNLFPALREFVGGGKPVWGTCAGLIFLANKAVGEWLQSFETELSVPKLSEKEGGNDTCRGVFIRAPAILEVGPDVEILADCPVPVDRPSITISFGEGTEVCMLLFFY

SEQ ID NO: 196 - protein, 352 aa, Zea mays
MAHAALLHCSQSSRSLAACRRGSHYRAPSHVPRHSRRLRRAVVSLRPMASSTAQAPATAPPGLKEGIAGLYDESSGLWENIWGDHMHHGFYDSSEAASMADHRRAQIRMIEEALAFAGVPASDDPEKTPKTIVDVGCGIGGSSRYLAKKYGAQCTGITLSPVQAERGNALAAAQGLSDQVTLQVADALEQPFPDGQFDLVWSMESGEHMPDKRKFVSELARVAAPGGTIIIVTWCHRNLDPSETSLKPDELSLLRRICDAYYLPDWCSPSDYVNIAKSLSLEDIKTADWSENVAPFWPAVIKSALTWKGFTSLLTTGWKTIRGAMVMPLMIQGYKKGLIKFTIITCRKPGAA

SEQ ID NO: 197 - protein, 333 aa, Zea mays
MATPTATALTCSCRPSSPSSSSAAFRRLNIFAPVSGAHSPPRRRLRLAPLHVVDDSKNPPEERSETDKMVDGMDFGELCSDFECISSPYVESTARQVARDILELREDNRAFNCYAVSVKYKDPLRTFVGREKYRRPLWITKALENPVVIMILQKRNPNLIAAQAQHRSSSNQRLLLSRQTVQEMSMQSTSNLTIRWALRGKPKNPLFASVGGDVIVRVESRFVLNQISGQVLEQAESWDLSASSLPAQAYFWLSRRVYSAVESGKDAIEAAKSAASSGLTTKGDQNLEAYPDPSADPTKFFQRPDDGFSQDVYQIGLLLAVIYFIVQFLKATL

SEQ ID NO: 198 - protein, 152 aa, Zea mays
MEVANRLMVKGKSALETEQAAVRVLQSLFPPLLLVLYKALLAPIANGQLAAMMLARATAISCQWLMGSCSVNSVTLPDGKSWSSGVFVEKCKYLEESKCLGICINTCKLPTQTFFKDHMGVDLYMEPNFEDYSCQFVLLLIAVQLRGAASTS

SEQ ID NO: 199 - protein, 663 aa, Zea mays
MQREDWRLRPLTPEMIEYARTDAHYLLYIANCLASELHAKACDTSSDKINFFFEASHRSNMVCMQLYSKEIESPPGASSATSILSRNLQTHGFDSKKSSEVKARMHDESLRYVLPDQAIAALAVSLPKGPTEVFAVIAETDLSISSMYPSLSSPSPLVVAHVKELCYLLDDITTSMDSIFKSLLEKYKDPSGLCRLSVYNYNLITHLSLKQTRFMLVMEDYFATVTAKNWNGLSPKYMLISYLHACSMNEELFWQTDELFYPRYIQRNLAKLIENSPPAIMLLFEPKGRPEDEDNEFYIQSKKNICVGCGEKSHYIRYRIIPSCYRMHFPEHLKSHRSHDIVLLCVDCHEIAHSAAEKYKRRIAEEFGIPLFVQKIMNSGDISLITNTSVSEDKLNGTGVSPLQLRTAAMALLRHGSTMPLKRCEELMQIVKSYYGGRDVTPEDLEMALLVGMSPHERRRLEKKKGYSFRAQAQTIIRKSSSNTISEDSGHGSENCHALSARFPEVGTGSNGQQEFDETGNQNQLENLTLSQGSSSLPVSMEDTTSDHDTVTLETDTEQQARGACTPGNSHDDKEQSICDNSSQVISKNAEKISLLGHGHHVDGGILVTSVSTSHQGKILNLQLQGIRLTRVSCCRWYPEVQLTFQNWFHSLKLDLVVLVPFP

SEQ ID NO: 200 - protein, 439 aa, Zea mays
MAMAAPPPTALCARRFRPHHFAYSSPATLRLPTASSSSQLRRRRRLAVSPRADAATGTGDVEALRAGVSVYKPRSYDVLVTDAARSLACAIDDGKTRLEIEFPPLPSSISSYKKQTTLNLKDTIDKTDRSKLLKGSSDEFIDANIQLALVVARKLKELKGTRSCIVFPDQPEKRRASELFKTAIDTIEGVTISSLDDVPTDPVNSFFKSIRNTLDFDFSDDNEGRWKSDEPPSLYIFINSSTRDLASIEKYVEKFATSVPALLFNLELDTLRSDLGLLGFPPKDLHYRFLSQFTPVFYIRQRDYSKTIAVAPYIVNYSGAVFRQYPAPWQVMLKQADGSYACVAESEARFTLGQAKEELLRVIGLQEEEGSSLEFLRRGYKVHPILAKQMLPGGKRTLIRRRRLPGELEMLYLLDGCFSNLELGMDNLANECPCLVVWN

SEQ ID NO: 201 - protein, 273 aa, Zea mays
MAHPTTQEGGRPGPDKRCASAMQFSSVLPLEGKACMSPVRRGSGGYGSERMRINCCSIRRNKALRRMCFSARGAVSSTQCVLTSDAGPDTLVVRTSFRRNYADPNEVAAVILGGGTGTQLFPLTSTRATPAVPIGGCYRLIDIPMSNCFNSGINKIFVMTQFNSASLNRHIHRTYLGGGINFTDGSVEVLAATQMPGEAAGWFQGTADAVRKFIWVLEDYYKHKAIEHILILSGDQLYRMDYMELVQKHVDDNADITLSCAPVGERYVITSGF

SEQ ID NO: 202 - protein, 216 aa, Zea mays
MKLEVMPKPKQRVLEAQQREEAMEMSGLDLWKHEKPPRICPLPPSLPPPPPAFDEAALVPPLNFAVVDDGIFRSGFPGTANFRFLKSLNLRSIVYLCPEPYPGTNTEFLEKNGIRLHQFGIEGRKEPFVNIPDDKIREALKVVLDPRNQPLLIHCKRGKHRTGCVVGCLRKLQEWCLSSVLDEYHRFAAAKARITDQRFMELFDVSSLKHLTPSHC

SEQ ID NO: 203 - protein, 439 aa, Zea mays
MAALCSASPAISAAASLGSPARVVASFLRLRLRLRAAKRSCSHAPAPSWRARRRFAAAAAEAEECSGVETLIPPDNRIPATIITGFLGSGKTTLLNHILTAHHGKRIAVIENEFGEVDIDGSLVAAQTAGAEDIMMLNNGCLCCTVRGDLVRMIGELVNKKKGRFDHIVIETTGLANPAPIIQTFYAEDVVFNDVKLDGVVTLVDAKHARQHLDEVKPKGIVNEAVQQIAYADRIIVNKIDLVKEPEVLSLVERIRGINHMANLKRAEYGKVDLDYVLGIGGFDLESYQFRTVGIKEIHSGYRIESAVAEKSHEDHAEHDHEHHEHENEHDHDHHHHHDHDHDHHAHDHTHDPGVSSADMWLGNLLLEHSEDIYRMKGLLSVSGMPQRFVFQGVHDIFQGSPERMWEPNEPRINKIVFIGRNLNKEELDKGFKDCLLKK

SEQ ID NO: 204 - protein, 359 aa, Zea mays; identical to SEQ ID NO: 137

SEQ ID NO: 205 - protein, 630 aa, Zea mays
MIQHRPLVLSLPSPAIIPPRPRRHRHHTTTPSLPSHSRSLLHHRFLRVTHLVVASRGDQRRTLRGATMGLFTVTKKATTPFDGQKPGTSGLRKKVTVFQQPHYLQNFVQSTFNALPVDQVRGATIVVSGDGRYFSKDAVQIITKMAAANGVRRVWVGQNSLMSTPAVSAVIRERVGADGSKATGAFILTASHNPGGPKEDFGIKYNMGNGGPAPESVTDKIFSNTTTISEYLISEDLPDVDISVVGVTSFSGPEGPFDVDVFDSSVDYIKLMNYDALHGVAGAYAKHIFVEELGADESSLLNCVPKEDFGGGHPDPNLTYAKELVERMGLGKSSSNVEPPEFGAAADGDADRNMILGKRFFVTPSDSVAIIAANAVQSIPYFASGLKGVARSMPTSAALDVVAKNLNLKFFEVPTGWKFFGNLMDAGMCSICGEESFGTGSDHIREKDGIWAVLAWLSIIAFKNKDNLGGDKLVTVEDIVRQHWATYGRHYYTRYDYENVDAGAAKELMANLVSMQSSLSDVNKLVKEIRSDVSEVVAADEFEYKDPVDGSVSKHQGIRYLFGDGSRLVFRLSGTGSVGATIRVYIEQYERDSSKTGRDSQDALAPLVDVALKLSKMQEYTGRSAPTVIT

SEQ ID NO: 206 - protein, 248 aa, Zea mays
MVARGQGGDRAEEEAAARWESEKEAEIDYVFKVVVVGDAAVGKTQLLARFARDEFALDSKPTIGVEFQTRTLTLHRKRVKTQIWDTAGQERYRAVTSAYYRGALGAMVVYDVTRRATFEHVARWVEELRAHADGSTVVALIGNKADMPAARREVPADEAARLAEDQGLFFSEASALTGDNVERAFLTLLEEVFAAVSRRALELDEARRMRGDQGDGGGEVLSLKGTAVDVGSIMETSAMKRSSQCACS

SEQ ID NO: 207 - protein, 315 aa, Zea mays
MDTIVSLSPQMLRQRQGHQSTASSSSSAWAITTARIGRHLSTASSCSSPRLLIKQRATAASAPAQKEKEVVFVAGATGRVGSRAVRELMKLGFRVRAAVRNAQRATSLVQKEKEQQLLELVECDLEKEPQEGIVSAIGNASLVVCSIGASEKEILDVTGPYRIDYMATSKLVQAATAAKQVEHFILVTSLGTNKIGFPAFLLNLFWGVLFWKRRAEEALIASGIPYTIIRPGGMERPTDAYKETHNLVLAPEDTYVGGQVSNLQVAELIGCMATNRSAAYCKTVEAVAEITAPLLPMEQLLSAIPSKREQRPADR

SEQ ID NO: 208 - protein, 493 aa, Zea mays; identical to SEQ ID NO: 148

SEQ ID NO: 209 - protein, 133 aa, Zea mays
MNCLQNLLKEPPIVGSRSMRRPSPLNLAMVRGGSRRSNTVKTLQAPGASTSGAESSAVEMGTEKSEVYSTNMTQAMGAALTYRHELGMNYNFIRPDLIVGSCLQSPLDVDKLRKIGVKTVFCLQQDSDLEYPH

SEQ ID NO: 210 - protein, 195 aa, Zea mays
MALLSATSPAKAHLSALLSCHDEPQQHQHALPVPHPRCFGGGKARRRARGRCAASMRPPDASVAPASAPAGEARRKKKPRVLVAGGGIGGLVFALAARRKGYDVTVFERDMSAVRGEGQYRGPIQIQSNALAALEAIDMSVAEEVMRVGCVTGDRINGLVDGMSGSWYALLLAATFTSFLCFCVRCGCVAPLHLP

SEQ ID NO: 211 - protein, 576 aa, Zea mays
MEPLVRRESTFNFKTVTLPVSTGWRVPLPIIHQRRNIGKREKRWSCCRAIIAPESAARPRLPSSLPPQIAGRPRRPSLPSPSLPHPLRVPEPRERRRAGRRAAMDVDCVSLPDAPAGDVDGGAARPWPKAVTNGGVHELLECPVCTNSMFPPIHQCPNGHTLCSTCKARVHNRCPTCRQELGDIRCLALEKVAESLELPCRYYSLGCPEIMPYYSKIKHEAQCGLRPYNCPYAGSECGAAGDIPSLVSHLRDDHKVDMHSGCTFNHRYVKSNPREVENATWMLTVFHCFGHYFCLHFEAFQLGMAPVYMAFLRFMGDENEAKNYSYSLEVGANGRKMVWEGTPRSVRDSHRKVRDSHDGLIIQRNMALFFSGGDRKELKLRITGRIWKEQQTPDGACAARQTISSSLPRFTHRPSVQGAMAAAAAACICLQLSLPSNHSSSACPPAYRKRVALAPGRGNRLLCTASGASSSSSVVVTKEQEEGSPEPEIFSYKDDPNFRGCKGCGRDELQRGCNGQGRIQGGIAAVPGFGWWPIKAYRPCPGFVASGGRYRRQGQSMDDVASGRGKKKPSPAKKQA

SEQ ID NO: 212 - protein, 664 aa, Zea mays
MLSTTWASPKATPIPSSPASQTATRLHPASSSNRTLRLVALPSPSAPRRRRRPGLPPPARAGLVATAAMPAPEPKARVLVAGGGIGGLAFALAAKRKGFEVLVLERDMSAVRGEGRYRGPIQLQSNALAALEAVDAAAADEIMDSGCVTGDRVNGIVDGVSGSWYIKFDTFTPAAERGLPVTRVISRMTLQQILARAVGDDAILNGSHVVDFIDDGSKVTAILEDGRKFEGDLLVGADGIWSKVRKTLFGHSDATYSGYTCYTGIADFVPPDIDTVGYRVFLGHKQYFVSSDVGAGKMQWYAFHNEEAGGTDPENGKKKKLLEIFDGWCDNVIDLINATDEEAVLRRDIYDRPPTMNWGKGRVTLLGDSVHAMQPNLGQGGCMAIEDGYQLAVELENAWQESVKTETPIDIVSSLRRYEKERRLRVAIIHGLARMAAIMATTYRPYLGVGLGPLSFLTKLRIPHPGRVGGRFFIKYGMPTMLSWVLGGNSSKLEGRLLSCRLSDKANDQLYQWFEDDDALEEAMGGEWYLIATSEGNCNSLQPIHLIRDEQRSLFVGSRSDPNDSASSLSLSSPQISERHATITCKNKAFYLTDLGSEHGTWITDNEGRRYRVPPNFPVRFHPSDVIEFGSDKKAMFRVKVLNTLPYESARSGNRQQQQVLQAA

SEQ ID NO: 213 - protein, 618 aa, Zea mays
MATATASRLAVLAPRPSRPAPGRRRHAPATGRGPPLPRSLYAAPRGRVLCLAAPAPAAASTTDAGQDRLQKVPISNIRNFCIIAHIDHGKSTLADKLLELTGTVQKREMKEQFLDNMDLERERGITIKLQAARMRYVMNNEPYCLNLIDTPGHVDFSYEVSRSLAACEGALLVVDASQGVEAQTLANVYLALENNLEIIPVLNKIDLPGAEPDRVAQEIEEIIGLDCRDAIRCSAKEGIGITEILDALVTKIPPPKDTSKDPLRALIFDSYYDPYRGVIVYFRVIDGSMKKGDKICFMANGKEYVAEEIGVLSPNQMQVSELYAGEVGYLSASIRSVADARVGDTITHYSKKAHHALPGYSEATPMVFCGLFPIDADQFEELREALEKLQLNDAALKFEPESSSAMGFGFRCGFLGLLHMEIVQERLEREYNLNLIITAPSVVYRVNCADGETVECSNPSLLPEPGKRRSIEEPYVKIEMLTPKDYIGSIMELTQDRRGEFKEMNFITESRAKLIYELPLAEAYAVGRALTQKLKELIPRQMFRVPIQACIGTKVIASEALSAIRKDVLSKCYGGDISRKKKLLKKQAEGKKRMKAIGRVDVPQEAFMAVLRLEKEVL

SEQ ID NO: 214 - protein, 591 aa, Zea mays
MAASGLGLSTSFLPGHDTLLRRRRRRPAGHAAASFRPVTAELGGVATELGRQLVEAVGVGLPCTVMQCGDVIYRSTLPRNDGLTITAPGLTLALATVSYLWSTPGVAPGFFDMFVLAFAERLFRPTFRKDDLVFGKKLGEGAFGVVCKASLANPEAAKKVRLMISITLAICVNKSYQWTSKTFCSSLKQGDLVVKKATEYGAVEIWMNERVRRACASSCADFIYGFCETKAKGKGAEEYWLIWRFEGEDTLYDLMQSKEFPYNVETKILGGIQDLPKGIARENKIIQTVMRQLLFALDGLHSTGIVHRDIKPQNVIFSEGSRTFKIIDLGAAADLRVGINYIPKEFLLDPRYAAPEQYIMSTQTPSAPSVPVATTLSPVLWQLNLPDRFDIYSLGLIFLQMAFPSLRTDSNLIQFNRQLKRCDYDLQAWRNLVEPRASAELRRGFDIMDLDGGIGWELLTSMVRYKARQRTSAKAALAHPYFNREGLLGLSVMQNVRLQLFRATQKDYSEAARWVIGLMARSGTEDVGGFTEAQLQELREIKPKKSSTQRNALASVLRLQRKIMRTIKESMDELNSQRKSIWWSRWIPREE

SEQ ID NO: 215 - protein, 731 aa, Zea mays
MASAAVETLVSFPIASRPRSLLRPFPRRPAAAAAAGGCAPSIRISAVPPRGLGLALVHRRARRCPPAARANVEHGGDGASGNGEPSSSSGDGDRDAAADSGGDTTGTSTTSAAQTPPPPSSKRGENKWRRRLTKGGGVGRWLWEPIVQGREMGFLLLQLGFAVFALRMLRPEIALPGSEPRPQTTYVSVPYSDFLASIDKDQVKKVEVDGVHVMFRLRPEVESQVRVEQTPSQRGTDAVVDNAGVSRRIVFTTTRPVDIKTPYEKMVENMVEFGSPDKRSGGTLNSALVALIYVVLIAVVLQRLPISFSQHSAGQLRNRKNSNSGRAKVSESTDIVTFADVAGVDEAKEELEEIVIDAVAKSRDGRYRIVSNDEREQTLNQLLTEMDGFDTNSAVIVLGATNRADVLDPALRRPGRFDRVVMVEAPDRFGRESILKVHVSRRELPLSKDVDLADIAAMTTGFTGADLANLVNEAALLAGRLNKEIVEKIDFIHAVERSIAGIEKKHAKLKGNEKAVVARHEVGHALVGTAVANLLPGQPRVEKLSILPRSGGALGFTYTPPTTEDRYLLFVDELRGRLVTLLGGRAAEEVVLAGRVSTGALDDIRRATDMAYKAVAEYGLNQRIGPISLATLSNGGLDDSGGSPWGRDQGHLVDLVQREVKALLQTALEVALSVIRANPAVLEGLGAYLEENEKVEGEELEEWLKSVVASKELTSFIRGQQEQVLQLEAGS

SEQ ID NO: 216 - protein, 231 aa, Zea mays
MACPAQSMLSASGCIFLRSKPQAASQVRGGIIGGGRSSRPFLLTCNASSSPSPSSPAPAQEDPDCNEEECAPEKEVGSLSAEWLAEERTQVVGTFPPKKKGWTGLVEKDTAGQTNIYSVEPMVYVAESAISSGTAGTSAEGAENTAAIAAGLVLITVAAASSILIQVNKSQVPQVPEAAYSGPPLSYYVTKFQPAVAAPAQTLEAPAPDEAQDGAAATVEAPEVPAPQLSS

SEQ ID NO: 217 - protein, 589 aa, Zea mays
MISSRLVPYSRPVRLHLRSPGPDTPLYQSRPPAHFSHPRAASGAGEPSRRSSNDPSLSRPFSLPLPAQGEERERMWSSSQASTRGVVEMGRVEAGPSHFPKRPAPQNSARVNLSRTHTVKPTSAGDRSGISVKCNLGWSSQPSPDLRHHFRGYSSASEAVLTSQSDVRKLFVGNEKIGVLLLNLGGPETLDDVQPFLFNLFADPDIIRLPRLFRFLQKPLAKFISEVRAPKSKEGYASIGGGSPLRQITDAQAEALREALHGKDVPANVYVGMRYWHPFTEEAIEQIKRDGITKLVVLPLYPQFSISTSGSSLRLLESIFREDEYLVNMQHTVIPSWYQREGYIKAMATLIENELTKFQEPQKVMIFFSAHGVPLAYVEEAGDPYKAEMEECIDLIMEELEKRGITNPCILAYQSRVGPVEWLKPYTDETIIELGQKGVKSLLAVPISFVSEHIETLEEIDVEYKELALESGIKHWGRVPALGCEPTFISDLADAVIESLPYVGAMAVSNLEARQSLVPLGSVEELLAAYDSKRDELPPPVIVWEWGWTKSAETWNGRAAMLAVLALLVLEVTTGEGFLHQWGILPLFR

SEQ ID NO: 218 - protein, 321 aa, Zea mays
MLCSGRMLACNGVLPGRLRLPRADAYHLRPPALARRWRVVASAAASGGSPDLPSSSSSPPNPPFGAGDDQTAASPGFCIIEGPETVQDFAKLDLQEIQDNIRSRRNKIFLHMEEIRRLRIQQRIKNVELGISDEERDHELPDFPSFIPFLPPLSAANLKVYYATCFTLIAGIMVFGGFLAPILELKLGVGGTSYEDFIRSVHLPMQLSQVDPIVASFSGGAVGVISALMVVEINNVKQQELKRCKYCLGTGYLACARCSSTGALVLTEPVSTFSDGDQPLSAPKTERCPNCSGSGKVMCPTCLCTGMAMASEHDPRIDPFI

SEQ ID NO: 219 - protein, 518 aa, Zea mays
MGTEAEQPDMDSHRNDGVVVVPAPRPRKGLASWALDLLESLAVRLGHDKTKPLHWLSGNFAPVVEETPPAPNLSVRGHLPECLNGEFVRVGPNPKFAPVAGYHWFDGDGYVQLRKKFKVLDFTYGFGTANTALIYHHGKLMALSEADKPYYTSIAAIMLMQNMCSTFSDVVKVLEDGDLQTLGLLDYDKRLKHSFTAHPKVDPFTDEMFTFGYSHEPPYCTYRVINKEGAMLDPVPITIPESVMMHDFAITENYSIFMDLPLLFRPKEMVKNGEFIYKFDPTKKGRFGILPRYAKDDKLIRWFQLPNCFIFHNANAWEEGDEVVLITCRLENPDLDKVNGYQSDKLENFGNELYEMRFNMKTGAASQKQLSVSAVDFPRVNESYTGRKQRYVYCTILDSIAKVTGIIKFDLHAEPESGVKELEVGGNVQGIYDLGPGRFGSEAIFVPKHPGVSGEEDDGYLIFFVHDENTGKSEVNVIDAKTMSADPVAVVELPNRVPYGFHAFFVTEDQLARQAEGQ

SEQ ID NO: 220 - protein, 340 aa, Zea mays
MALASQVAANQPPPPTLSSPARRLPRASSNALLLLQPAAAVLGGRTLRLRPPGARRRALDAVVVARASSEAKAETAEAGGGGGGAEEERPYEEYEVTIEKPYGLKFTKGRDGGTYVEAIQPGAAADLTGQFEVGDKVLATSSVFGEEIWPAAGYGQTMYCIRQRIGPLYMKMERRFGKWDGAGDLTEKEIIRFERNSGVVSGRVREIQLQNYQRKMEQKMQREEDLRMGLKLYKDGKYEEALEKFESVLGSKPEPSEAAIASYNVACSYSKLGRVEAALSALEDALKSGYEDFKAVRTDPDLANLRKSEEFEPLLKNYDESFINENAINAIKSLFGLGNK

SEQ ID NO: 221 - protein, 335 aa, Zea mays
MATQYARLSLPCRLPSPLPPPVPTTTRRLPRAAAAAASTSPRCPRVGGAAATRARGPCRPRASEGEVQQQEAEADQVVDSNMLPYCSINRKEKKSIGEMEQEFLQAMQARTHARAFYYEGKAIMSNEEFDNLKEELMWEGSSVVMLSPDEQKLLEAAMAYVSGNPIMTDDEFDQLKLRLKKEGSDIVQEGPRCSLRSRKVYSDLTVDYLKMLLLNVPAAVVALALFFFLDDFTGFEITYLLELPEPFSFIFTWFAALPLIFWVAQAITNVIVKDFLILKGPCPNCGNENLSFFGTILSVPSGGSKNSVKCASCGTELEYDSSTRLITLPEPAEAK

SEQ ID NO: 222 - protein, 409 aa, Zea mays
MGLSTVYSPAGPRLVPAPLGRCRSAQPRRPRRAPLATVRCSVDATKQAQDGVATAVATEAPASRKECFGVFCTTYDLKAEDKTKSWKKLVNVAVSGAAGMISNHLLFKLASGEVFGQDQPIALKLLGSERSFQALEGVAMELEDSLYPLLREVSIGIDPYVVFQDVDWALLIGAKPRGPGMERAALLDINGQIFADQGKALNAVASRNAKVLVVGNPCNTNALICLKNAPNIPAKNFHALTRLDENRAKCQLALKAGVFYDKVSNVTIWGNHSTTQVPDFLNAKIDGRPVKEVIKDTKWLEEEFTLTVQKRGGVLIQKWGRSSAASTAVSIVDAIRSLVTPTPEGDWFSTGVYTTGNPYGIAEDIVFSMPCRSKSEAELLAEKKCVAHLTGEGNAFCDLPEDTMLPGEV

SEQ ID NO: 223 - protein, 586 aa, Zea mays
MARRAASSLVSRCLLARAPAGAPPAAPSAPRRTVPADGMHRLLPGVLQRFSTAAAVEEPITPSVHVNYTKLLINGNFVDSASGKTFPTLDPRTGEVIAHVAEGDAEDINRAVAAARKAFDEGPWPKMTAYVNTQLEILVSAVSSWPEAMLTDGWNLTLQERSRILLRFADLIEKHNDELAALETWDNGKPYEQAAQIEVPMVARLMRYYAGWADKIHGLIVPADGPHHVQILHEPIGVAGQIIPWNFPLLMYAWKVGPALACGNTLVLKTAEQTPLSALYISKLLHEAGLPEGVVNVVSGFGPTAENGLKNYTFGLNIYFFPSIKIAFTGSTDTGKIILELAAKSNLKTVTLELGGKSPFIIMDDADVDHAVELAHFALFFNQGQCCCAGSRTFVHERVYDEFVEKAKARALKRVVGDPFRKGVEQGPQIDDEQFNKILRYIRYGVDGGATLVTGGDRLGDKGFYIQPTIFSDVQDGMKIAQEEIFGPVQSILKFKDLNEVIKRANASQYGLAAGVFTNSLDTANTLTRALRAGTVWVNCFDVFDAAIPFGGYKMSGIGREKGVDSLKNYLQVKAVVTPIKNAAWL

SEQ ID NO: 224 - protein, 823 aa, Zea mays
MAANNNPWRVPMPPLLNVRAGFGDTSLFSTSLPVLPHEKLIFSHSSHGTPSKDDASAKMKVLADDPDEKDYKFDFDLRQIDDLLPDEDEFFAGITDETEPIGQTNTTEELEEFDVFGNGGGMELDIDPVETITVSFANSSIVDGARGNGINPFGVPNTVGTVAGEHPFGEHPSRTLFVRNINSNVEDSELRSLFEQYGDIRTLYTATKHRGFVMISYFDIRAARNAMRALQNKPLRRRKLDIHFSIPKENPSDKDLNQGTLVIFNLDPSVSNEEVRQIFGAYGEVKEIRETPNKKHHKFIEFYDVRAAEAALRSLNKSEIAGKRIKLEPSRPGGTRRNLMQQLGHDLDQEEPRSYRHPHVGSPIANSPPGAWAHYSSPTDNNMLQAFTRSPTGNGMSPIGMPSLISNAPKIAPIGKDSNRSKYDQVFSNGNQSLGAAFQHSHSYQDHNSEQMSSSPGTLSGPQFLWGSPKPYSEHSKSPIWRPPANGPALSSSSRTQGQGFLYSSRQASLFGSLDQHHHHVGSAPSGAPFENHFGFLSESPETSYMKQLKFGNMGNVGIGRNGGGLMLGMASHASVNPGSSLIGSLTDNVSSSFRPILSPRLGQAFYTNPPYHGPGTFGLDSSIDHARNRRVDSSVLQADSKRQYLLDLEKIRRGDDTRTTLMIKNIPNKYTSKMLLAAIDELHKGIYDFFYLPIDFKNKCNVGYAFINMVSPVHIISFYQAFNGKKWEKFNSEKVASLAYARIQGRSALISHFQNSSLMNEDKRCRPILFNPNGQDSVNQEAFPINGICIHMPLEDDCLDNEENKSLNEKTGENSTDIAGSL

SEQ ID NO: 225 - protein, 810 aa, Zea mays
MQVVNLLPRALLINRIGRTIFLSEYHDETEEPLQPYEPPKVFQWRSEFGSELLKLRLEGYQWSTPFSINANGVMCVLMNSTTGNDQAFVRVNVRSGTKSSRHEVVFQLDCWSSPYRVENRSMFLPIRFRQFGGDDHSWRNLLPNSSASFFLEDLSRRHLLEVLVDGTDPMNSMTYDINVVMDHQPLTNSDALKKALRVTVLKEGKLNVIQIIDWLPDNRNRGQITERMLSPIFQPSEVDYGQSSPDLDSEFHVTLELTELGISVIDHMPEEVLYLSVQQLLLAYSSGIGSGVNRLKMRMHWIQVDNQLPFVPMPVLFCPQKIENQSDYIFKFSMTVQTNNSLDFCVYPYVGVQVPENCVFFVNIHEPIIWRLHEMIQHLKFDRIYSNQPSAVSVDPILKIGLLNISEIRFRVSMAMSPSQRPRGVFGFWSSLMTALGNMEHMPVRIAQRYREELCMRQSALMNSAISNIQKDLLSQPLQLLSGVDILGNASSALSNMSKGIAALSMDKKFIQGRMRQDSKGVEDFGDVIRDGGGALAKGIFRGVTGILTKPIEGAKSSGVEGFVQGVGKGIIGAAAQPVSGVLDLLSKTTEGANAVKMKISSAIMAEEQLLRRRLPRAIGGNSLLYPYDGHKATGQAILHLAECATFLGQIDIFKIRGKFASTDAYEDHFLLPKGKIFLITHRRVLLLQLPMMTQRKFNPTKDPCSVIWDVLWDDLVTVEMTHGKKDPPDSWPSKLILYLKAKPSNSKEIVRLVKCNRGSDQASIIYSAIDKAYKAYGPNSLKEFLRWKVPRPYAPRNSSGRSIQDLSFG

SEQ ID NO: 226 - protein, 368 aa, Zea mays
MACLTDLVNLNLSDNTEKIIAEYIWIGGSGMDLRSKARTLSGPVTDPSKLPKWNYDGSSTGQAPGEDSEQTWERSLSLGHVAPCSPQAIFKDPFRRGNNILVMCDCYTPAGEPIPTNKRYNAAKIFSSPEVAAEEPWYGIEQEYTLLQKDTNWPLGWPIGGFPGPQGPYYCGIGAEKSFGRDIVDAHYKACLYAGINISGINGEVMPGQWEFQVGPSVGISSGDQVWVARYILERITEIAGVVVTFDPKPIPGDWNGAGAHTNYSTESMRKEGGYEVIKAAIEKLKLRHREHIAAYGEGNERRLTGRHETADINTFSWGVANRGASVRVGRETEQNGKGYFEDRRPASNMDPYVVTSMIAETTIIWKP

SEQ ID NO: 227 - protein, 493 aa, Zea mays
MKGCSERLLLLLLLASSLLLSVVVAAQQTCPADLDSKCDGGAPDDWEGEFFPGVPKIKYEGPTSKNPLAYKWYNKEEVILGKKMKFSLYPLFYTVKDWMRFSVAFWHTFRGTGADPFGAPTKVWPWEDGTNSLAMAKRRMRAHFEFMEKLGVDKWCFHDRDIAPDGKTLEETNANLDEIVELAKQLQGETNIKPLWGTAQLFMHPRYMHGAATSPEVKVYAYAAAQVKKALEVTHYLGGENYVFWGGREGYQTLLNTDLKRELDHLANFLQAAVDYKKKIGFNGTLLIEPKPQEPTKHQYDWDVATTFAFLQKYGLTGEFKINVECNHATLSGHSCHHELETARINGLLGNIDANTGDPQVGWDTDQFMTDIAEATLVMSTVVKNGGLAPGGFNFDAKLRRESTDVEDLFLAHISGMDTLARGLRNAAKLIEDGSLDALVRKRYQSFDSEIGALIEAGKGDFEALEKKVLEWGEPTVPSGKQELAEILFHSAL

SEQ ID NO: 228 - protein, 428 aa, Zea mays
MLHIFPKLLKQFPFPPRPLSSSQRVPTRRRLLPLRLLMASPTQGDAPLAAPAPAADATDAAFAAAAAVPDPGAEFGFQRPELGKEKLVGTVGFHERHVFLCYKGPDLWPSHLEASESDRLPRLLAAAIKARKPNLKKTIKLTICEGEDGTESSNGDVLIFPDMIRYKGLTHFDVDNFVEEVLVKDIDWLPRSPEPMSGSYIFVCSHGSRDKRCGVCGPALIKRFKEEINELGLDDQVAVSACSHVGGHKYAGNVIIFSSDAKGEVTGHWYGYVVPDDVPVLLHKHIGQGEVVDHLWRGQMGLSVEQQKRALELRNMVNGGEESLEETRTDGASFNPAAAGGCCQGNGGFTCCQTDLPKEKQDKSIIAEQNPKSSDKEGGAGSKKGDTKTCPVPIWFETWERADTYAALAVVAAAAAVLVSFRIYKNLN

SEQ ID NO: 229 - protein, 4197 aa, Zea mays
MDIKSMGETIDSTEGTLKIPEDQVLVEAPSDVQLPPEHNLNGEASSLNGHTDKEEKVSVEQPHDNDQEEAELDQNNRINKEDAADGLSHGESTTEDSCLLKHKKDEESKGDEQQDLGVTVDDDLVQEDTLKTDNAIEQTDDGQQDQDQEPEKANENTEPASIANNDDVEIVAETPTGLQAPVESRMNDSDGIPETIDEETETDEPAQADGVVHPEDVAKVEDQQSQQDDTVDADVAPEEVKCEETDQQEEKPKSEAHEPTIDTREALNQEPAEETDDSMNKKIEETAHQRNMAAPKETTLEHEATMSATPVNTQVQDQEPLEEIEDTEKGIQPSSGSGDAIPEDQSNLSVTIDNDTVNEDTVIGIEQQDDGQQDEDLEPEKATEDTQPASMTNIPQVEVVTEASSGVQTPGDLNLNNSDAVPDTIDANTETDEPSKAHSVVHPEKKERFLEDATTEEPTEEVVKVEAQQSQQADVMDANMVQEEVPKSEHADEPATDAFEVLNQESVDEPAIQAPVTIQVQNQEPLEEIELAEAVDTEATVQQSSAAFEESVPEHQCNLGATHNTEQEDTLEASGQSKGGQEYQDLGPENATENTQQASMTNILDVEVITETPSGIQTPMEINLVISDAIPDATDGNTETDEPAKAHTFVHPEKNEVFPENTFTTKPTAEVVKVEDQQNQQDDAMDAEVVLEEVPKSERADEPATDALEVLESVEETDDPMNEKTEETTQQSNIPASEETTAEYDATREPPANNQVQNKEPVDERESTVEEREVAEAVDTEAPVQQSSVAFDEAVPEEHHNLGVANNTVQEDTMEATGQTQEGQQYQDLGPENAAENTQPASTENIPDVEVITKAPSEIQSPVEINLDISDAIPDTNDGNTETDEPAKANTVARPDTEESFAEDTSTGPTEEVVTLEDQQSQQVDAKDADVVQEEVPTSEHTDEPATDAVEALNQESDEETDGPVYENTEETTHQSNMPASEETLPENDVTTREPSVTIQAQNQESLEEREVHEAVDTEATVQPSSASFEESVPEHQHNLGATNDTVQQDTLEATKQTKGGQQYQDLGPENATENTQPASMANIPDVDVITKASSGIQTPVEINRDISDAIPDATDGSTETTEPAKAHSIIHPEKKESFQEDTSTAEPTEEVIKVEDRQSQQAEAMDADVVQEDVPKSEHADEPTADALEVLNQESIEETNSPVNEETEEATNQSNMPASEETIPKYDAATRDQPVNIQAQNQEPVDEGEATVEEREVAEAVHTEAPVQQSSVAFEEAVPEDQHNLGVANNTVQEDMMEATGQTKEGQRYQDLGPENAIENTQPASTANIPEVEVITEAPSGFQTPVEINLDISDAIADTTDGNTGTDELVKAEGVIHPENKESFLEDTSTTEPLEEVANVEDQHNQQADAMDADVVQEEVPKSKADEPATDTLEVLNQEYAEETSGPANEKIEETANQSNMLTSEETVPEYDTATRDPPVNIQAQNQESLEEREATVAENEVAEAVDTEAPVQQSSVALEDAVPEDQHNLGATNNTAQEDTQDAIGQTKEGQQFHDLGPENATENTQPASMANIADVDVTTEAPSGIQTPVEINLDISDAIPDTTDGNTETDKLVKTEGVIHPEKKESFPEDTSTAEPTEEVANVEDQQSQRADAMDADVVDEEVPKSEHADEPATDALEVLNQDYAEETNDPVNEKTEETGNQSNMPPSEETTPEYDTTTREPPVNIQAQNQESLEEREATVEESEVAEAVDTEAPVQQSSVALEDAVPEDQYNLIATNNTVQEDTQEAIGQTKEGQQYHDLGPENATENTEPASTANTPDVDVITEAPSGIQTSIEINLDISDAIPDTTDGNAKTDELVKVDGVILPDHKESFSEDTCVVEPTEEMIEVDQLGQQADAIHAEVLQEEVPEMIEVDQLGQQADVIHAEVLQEEVHKSEQSDEPGVDAQEVLNQESAEETDGLVNVKTDETEHKSNMVVPDDTIPEHDAQTREPPVNIQEQSRESVGDAEAVNTEAEMQQNSVAFEETTPENHVATSEPCSEIQHAHHVEPEEINGPEDGKDDEITNMSSREYLVRDNVLQSGPIIDIQPVQELEQIKTDEASNQTHAVIFNDLAQEDATATSEPQVTETELKDIEATEAEEITKLDHVTHSKELAVENDSTADEPHKGEIHQTLEQDLVEVKDTGTYHEKTISTSEDTVQDNLTEDEPSFGSQEVDDAESTEETKQNIAENIAEVSDVAIVDDAIEQNVLQTEDIVEMHKQELEREETERIEPVESEEASDQRNDAPFDYSAREDNTKESEIQQTESATETNEIEPTEIEAVPRESNTCVSEEPSQEDHIKESETSFDNQEVNITESSEVNDSHKDIISGGISDPSNTASAGDSSEGSNVPEGEPPEQAVQELGSEEIKNTQIDEVNETSLEMNATVFQIPSQEENPDTTKLHESTEVSNIEATEMHGNPHQSDLAAQSEEQTTEGISSGLKPESIEGNDTEAKKCQSTSQEKTISASESVPEDATTEPDVDHQQLQDQESAKLKETEADKFQEIVSSNTLSSEEFTSTEPSSDTEADNSQLAEETEDTEIVKSNTALAEAAAPETDATADTSSFHETDLEENKDTGTIETEDGMVSSDYTSEKMDTETMETEAVPHDSSDANIKEHTEDDTSTPNAPHAGTEPVHELESVEVSADTTEHPGETHDSASDELTPTEENTAVTEPSFSTQEVQNLTSQEIKDSEDDKTDEFSDINSFPIPGEADQVPRSETTPDVQEVEELGLTEETRDIEAIEPGDQQEDIVSTLEKPEIDGEPSADNQQVHEDKLPEVEDNKAIEAEASKQSNIATPDNAAEERNELESDPDPYAQPAEQVELSKDNENSQLVKTEETSDQSNFVVLRRTTEDSVAREIDPPVAIKQEQPVEEIKGVDATEAEEDFRTTQAVAIEKLASVNKIATVEPTYDIQRMDDLEATEEKKHAEAINEGDQSNIAVSEEQTPTYNGETPEDHHVESNEGTMGNETDNIILAHGIKDEIQKSAELKVYVFCTTSLSKNARSIQDVVEASNSIHQVKEEPDAGTEHNSSQMISECSGENETHVQDRDVDMWILTEGVIAEASQALLENDPQAAQDTIEKDDTTKSSEPISDHDSRQHCDVEALQQQSCETEALSILEQDEALQKIDSDQKQKEVEEIESQNDELQVDEQKHEDKRDDLAKEPLVEYQNFENRASNNTKDNDAFKVEQTEAANSEILKNKALHISKESTPSIMAMKVENIKETSEGTEEDDAAKNDNKDEQENAENVDIVSKTSTNEQGQTTDEIRKEEDPVHIIQASEKEIADEIEESKEIHEDNAICHDKLQTNSEKEESPQPHSNEPYNVDAKIDDTTSLCEEIIHDNTSINPREIEEIGENKGPDFTSEPSVESSIQNNVEDSSSHHKVEDEKLSMSEKNDVDTEAMQEINDESGADINQTEQCQEEITADDVLQLETEGNSFDKIEETASNEETETSTAATEAVTFNEDITDKVSGADGAPSNGSLKTFTDTGRDIDVPLVITTSKEESVNDTMENLNLDLPGHQAQDGNTAEKVLSLEEREREMPSSEKLLQTEPGENQIPNEQDEKDIRDENQTLKEKDEDDMQDTEFGEAKKEVQQELPVSHFLMNLILGKESSDANEDSESEAARKQGEATEDDSCTFISEQEESLGSLPTENKVDDNPTFVEQEKHEVKCSEETQEMVEEQSDDQLHTERSIEIDEDIKKNTRALEIPAYQDNPQDGISGELQTEEAAGVSTKMVTRDIDISSVVLDNRTVGTVCQEKMEVSTKNENGSLRSSLNDSTNTMAPQDDTLGEGQSRLVLEPLPEDKSVDVVSEQAPLLTESGMTDANDLSSDTTSAQNPVSTKPTESARVEATYSTDIQLENEEVDKKEEDQHANTTKDEVSKEIVESSHINLQKITRPEEKSNELETQITEPVCDSQAILAHEKEISEENFPTAVEIQADGPNMQINQDKQDEAADIETEMKPEKLGESNFQEHQDNGTEQKSPKETDEGDQQLVAKKEILTQEMDVHETVERPQQAVESPQQTVSITSNEDQELFDSKVQERDLNVVSPREASEAEENFVDVTKPEFSTDEEQSPKADAEEKIYDEKIKDIEGTKNLTDEAAIKTEAPGAAQKTRKKYSLLSGVGSKVKHQLAKVKKAIVGKPGHTKPVSPTA

SEQ ID NO: 230 - protein, 347 aa, Zea mays
MASSSAALAVLMLSWAAALAAASSPVTLFEAGYMPLFGGGNLVPSPGGRSVRLKLDRHTGSGFVSRSSYHHGFFSASIKLPDHHTAGVVVAFYLSNADVFPGNHDEVDFELLGNRRGHEWRVQTNIYGNGSTSRGREERYLLPFDPTLRPHAYAVAWTPTAILFYVDGTPIREVVRVPAMGGDFPSKPMSVYATIWDGSAWATEGGRYKVDYAFAPFAADFSSLVLSGCPVAGGGDDLAAAECQVATMTADCAVMTPAKRAAMRRFRRRYLLYTVCHDMYRYNGTVFPECDADGSERDDFHKWGESKRVSPSSRGYKQQQQRADKAVAVAAPGRPDTWPTVGTLRVD

SEQ ID NO: 231 - protein, 992 aa, Zea mays
MDSRPRETDAPGDPANGAAPPLAAAVTAATGDVEIIRPRNDKRGYRRVVLPNSLECLLISDPDTDKAAASMNVSVGYFCDPDGLEGLAHFLEHMLFYASEKYPEEDSYSKYIAEHGGSTNAFTSSEHTNFYFDVNSDSLHDALDRFAQFFIKPLMSPDATLREIKAVDSENQKNLLSDPWRMSQLQKHLCAENHPYHKFSTGNWNTLEVKAKEKGLDTRLELIKFYDSHYSANLMQLVVYGKDSLDNLQNLVENKFCDIRDVGRKPFSFPGHPCTPEHLQVLVKAVPIKQGHTLRILFPITPNIRCYKEGPCKYISHLIGHEGEGSLFYVLKKLGWAMSLEAGEGDWSHDFSFFCVVIQLTDVGQEHMEDTLGLLFRYIKLLQNSGTPKWIFDELQAICETGFHYRDKSPPINYVVNISSNMQIFPPKDWLIASSVPSKFSPDAIQNVLNELTPETVRIFWESKKFEGKTKLAEPWYGTSYSVEVVPPSIIQKWVGKAPEEDLHLPKRNIFIPSDLSLRSVEEKVSFPAMLRKTQFSRLWYKPDTMFFTPKAYIKMDFHCPLSQSSPESAVLTDVFTRLLMDYLNDYAYDAQVAGLYYVVKPNDTGFQVTMVGFNDKMRTLLETVIGKIAEFEVKADRFSVIKEAMTKEYENFKFRQPYQQVLYYCSLILEDQTWPWDEEFSALSHLEASDLGIFLPHLLSKTFIECYFAGNIEPNEANNIVQHVEDVLFNAPISACKPLSPSQHLAKRIVKLEKGLRYYYPAMCSNHQDENSALLHYIQTHQDNVKQNVLLQLLALVGKQPAFHQLRSVEQLGYIALLRQRNDSGVRGLQFIIQSTVKDPANLDARVENFLNMFESNVYNMSDAEFKSNVSALIDMKLEKYKNIREESAFFYGEISEGTLKFDRKEAEVAALRELKKEELVGFFNDHVKVNAPQKKILSIQVYGGLHSAEYETIVQNAPPPPSCEITDIYGFRRSRPLYGSFRGGVGQMKL

SEQ ID NO: 232 - protein, 250 aa, Zea mays
MVTVREETRKGPWTEQEDLQLVCTVRLFGERRWDFIAKVSGLNRTGKSCRLRWVNYLHPGLKRGRMSPHEERLILELHARWGNRWSRIARRLPGRTDNEIKNYWRTHMRKKAQERKRNMSPSSSSSSLSYQSGYPDTPSIIGVKGQELHGGSGCITSILKGTHPDMDGYPMDQIWMEIEAPEVPSEVGFVGGNENVCSSLATPLPPPTVWEYYPEVCWKLDDEIKMAPQFGYIVKELTPASDTIYIGSDY

SEQ ID NO: 233 - protein, 374 aa, Zea mays
MASSSKGSLPCVLLLLAVFHHGCSSARAHRRAGDMERSMSTDDSSMIERFQRWKAAYNKSYATVAEERRRFRVCARNMAYIEATNAEAEAAGLTYELGETAYTDLTNQEFMAMYTAPAPAQLPADESVITTRAGPVDAVGGAPGQLPVYVNLSTSAPASVDWRASGAVTPVKNQGRCGSCWAFSTVAVVEGIYQIRTGKLVSLSEQELVDCDTLDDGCDGGISYRALRWIASNGGITTETDYPYTGTTDACNRAKLSHNAVSIAGLRRVATRSEASLANAVAGQPVAVSIEAGGDNFQHYKKGVYNGPCGTNLNHGVTVVGYGQEAAGGDRYWIVKNSWGQGWGDDGYIRMKKDVAGKPEGLCGIAIRPSYPLM

SEQ ID NO: 234 - protein, 350 aa, Zea mays
MDGCSLFLIKSLRSQIDNMESSFSSSLGNNSSRILVIGGTGMMGQHLVKASLAAGHPTAVLVRPASSSKLELLETIKASGATVIGGDIYDHESLVAAFHQVDVVISAVGHHGPHDLEDGQLRIVAAIKEAGGSVKRFVPSEYGCDVEQAARSAAVLEPARSIVLAKVRVRQAIRAAGIPHTFVCSYWAHGFVLPRLGDPHADGLPATRATVFGDDATRAIFVHEADMAAVTVRAVDDPRALDKTLYLRPPANTCSLAHLVRLWEDKTGRALDKYYMPDEELVNRIRDSPLPLNFQLAMVHATVVAGVCDQTVDAEAGGVEATELYPDVNYVTVHDYLDGLKESLTRNVNS

SEQ ID NO: 235 - protein, 858 aa, Zea mays
MELDRLLLDQLAGEALRELLHAVQGTLFCRSTAERLRRSVEPLLPLVQGLGPHAQRSAGDLGELAARVREALDLARRAATSPRWNVYRSAQLSRRMEAADRGIARWLERHAPAHVIGNVRGLRDESHARIARLERRVDEIAASAAQPPPPALSVPVAPHKGVTMPMEVPTHKGMAMPMPMPVPVQAVPAKAGVVAMDMDLTEGHENEGMVGAGVKVAKEKVKEMVMSGGGGGWEVVGISGMGGSGKTTLAMEIFRDHKVRAYFNDRIFFETISQSANLEAIKMKLWEQISGNMVLGAYNQIPEWQLKLGPRDRGPVLVILDDVWSLPQLEELTFRFPGCKTLVVSRFKFPTLVKQTYEMQLLDEAAALSVFCRAAFDQECVPRTADKRLVRQVSAECRGLPLALKVIGASLRDQPPKIWLSAKNRLSRGEAISDSHETKLLERMAASVECLSEKVRDCFLDLGCFPEDKKIPLDVLINIWMEVHDLDEPDAFAILVELSNKNLLTLVNDAQNKAGDLYSSYHDYSVTQHDVLRDLALHMSGRDPLNKRRRLVMPRREETLPKDWQRNKDTPFEAQIVSIHTGEMKGSDWFQMNFPKAEVLILNFASSLYYLPPFIASMQNLKALVLINYGTSSAALDNLSAFTTLNGLRSLWLEKIRLPPLPKTTIPLKNLHKISLVLCELNSSLRGSTMDLSMTFPRLSNLTIDHCIDLKELPASICEIGSLETVSISNCHDLTELPYELGKLHCLSILRVYACPALWRLPASVCSLKRLKYLDISQCINLTDLPEELGHLTSLEKIDMRECSRLRSLPRSSSSLKSLGHVVCDEETALLWREAEQVIPDLRVQVAEECYNLDWLAD

SEQ ID NO: 236 - protein, 276 aa, Zea mays
MEAVARSGDYLWRFVAETEWYNEVVLSAVAPGDWWRGLPHPVQSWMRNCVGGYLLYFISGFLWCFVIYYWKRHAYIPKDAIPTNEAMKKQIVVASKAMPFYCALPTLSEYMIESGWTRSYFDISEIGFSMYLCYMAMYLIFVEFGIYWMHRELHDIKPLYKYLHATHHIYNKENTLSPFAGLAFHPLDGVLQAIPHVFALFLFPTHFRTHIALLFLEAVWTTNIHDCIHGKIWPVMGAGYHTIHHTTYRHNYGHYTIWMDWMFGTLNEPEDILKKA

SEQ ID NO: 237 - protein, 886 aa, Zea mays
MRAVLLLALLLSACAAAAAQGANSTAFVPRDDIRLDCGAKGQGNDTDGRVWTGDAGSKYAPPDNLASVASASGQDPSVPQVPYLTARVSASPFTYSFPLGPGRKFLRLHFYPANYTDRDAADGLFSVSVAAPGGNLTLLSNFSAYQTAAAITYSYLIREFSVNVSSPTLDLTFTPEKAHPNAYAFVNGIEVVSSPDLFDISTPNMLAGDGNLQPFPIDAGTAMQTMYRLNVGGQAISPSKDTGGYRSWDDDSSYIFGASFGVSYPKDSKVTITYPSNVPEYVAPEDVYGTARSMGPDKNVNMNYNLTWMLEVDAGFMYLIRMHFCEIQYPITKINQRVFNIYINNQTAVKGADVNAWAAVSGATTLIGTPVYQDYVVSTTGLGAMDLWVALHPNPDSKPQIYDAILNGMEVFKLQLTNGSLAGLNPVPSVAPVPDGTTKKKSSVGPIVGGVVGGLVVLALGYCCFVICKRRRNAGKDAGMSDGHSGWLPLSLYGNSHTSSSAKSHTTGSYASSLPSNLCRHFSFAEIKAATNNFDESLILGVGGFGKVYRGEVDGGTTKVAIKRGNPLSEQGVHEFQTEIEMLSKLRHRHLVSLIGYCEEKNEMILVYDYMAHGTLREHLYKTQKPPLTWRQRLDICIGAARGLHYLHTGAKHTIIHRDVKTTNILLDEKWVAKVSDFGLSKTGPSMDHTHVSTVVKGSFGYLDPEYFRRQQLTEKSDVYSFGVVLFEVLCARPALNPTLPKEEVSLAEWALHCQKKGILDQIVDPYLKGKIAPQCFKKFAETAEKCVSDQGIDRPSMGDVLWNLEFALQMQEGAEESGSLGCGMSDEGAPLMVGKKDPNDPSIESSTTTTTTTSISMGDQSVASIDSDGLTPSAVFSQIMNPKGR

SEQ ID NO: 238 - protein, 514 aa, Zea mays
MPAGGFSVSAPSGVEFEAKITPIVIISCIMAATGGLMFGYDVGISGGVTSMDDFLGKFFPAVLRKKLEDKESNYCKYDNQPLQLFTSSLYLAGLTATFFASYTTRRLGRRLTMLVAGVFFIVGVIFNGAAQNLAMLIVGRILLGCGVGFANQAVPLFLSEIAPTRIRGGLNILFQLNVTIGILFANLVNYGTSKIHPWGWRLSLSLAGIPAALLTLGALFVTDTPNSLIERGRLDEGKAVLKRIRGTDNVEPEFNEIVEASRVAQEVKHPFRNLLQRRNRPQLVIAVLLQIFQQFTGINAIMFYAPVLFNTLGFKSDASLYSAVITGAVNVLSTLVSVYSVDRVGRRMLLLEAGVQMFLSQVAIAIVLGIKVTDHSDNLGHGWAIMVVVMVCTFVSSFAWSWGPLGWLIPSETFPLETRSAGQSVTVCVNLLFTFVIAQAFLSMLCHLKYAIFVFFSAWVLVMSLFVLFFLPETKNVPIEEMTERVWKQHWFWKRYMDDDNHHIVNGKLTGASV

SEQ ID NO: 239 - protein, 725 aa, Zea mays
MPPLAFLRRYLPARLLARACDGGVRGSPGVARDEEAGGSGGLSGRSAGAPSGECYACTQPGVPAFHSTACDQVHSPDWDADAGSSLVPVQAQQQAQPAAAAAQHAARWLFGPVLDPRSKRVQRWNRWILLGRAAALALDPLFFYALSIGRAGRPCLYLDAGLAAAVTALRTCADVAHLAHVLLQFRLAYVSRESLVVGCGKLVWDARAIAAHYARSVKGLCFDLFVILPIPQVIFWLVIPKLIREERVRLIMTILLLMFIFQFLPKVYHSIHIMRKMQKVTGYIFGSIWWGFGLNLFAYFIASHIAGGCWYVLAIQRIASCLQEECKKNNSCDLISLACSKEICFHPPWSSNVNGFACDTNMTSFSQRNVSTCLSGKGSFAYGIYLGALPVISSNSLAVKILYPIFWGLMTLSTFGNDLAPTSNGIEVIFSIINVLSGLMLFTLLIGNIQVFLHAVLARKRKMQLRFRDMEWWMRRRQLPSRLRQRVRKYERERWAAVTGDEEMEMIKDLPEGLRRDIKRYLCLELVKQVPLFHGMDDLILDNICDRLRPLVFSSGEKVIREGDPVQRMVFILQGKLRSTQPLTKGVVATCMLGAGNFLGDELLSWCLRRPFVDRLPASSATFECVEAAQAFCLDAPDLRFITEHFRYKFANEKLRRTARYYSSNWRTWAAVNIQLAWRRYRARASTDLAAMAAPPLAGGPDDGDRRLRHYAAMFMSLRPHDHLE

SEQ ID NO: 240 - protein, 346 aa, Zea mays
MNLASAVRVFLSYYLLVQRWMGSEQGGGVFDQGGHSVSLTRLDEARAPPRCAVRSSPSSAASLPPKPLLVAAPRETGEYPVILFLHGYLAVNSFYSQLFEHVASHGFIVVGPQLYTISGADTTEEINSAAAVIDWLATGLPSTLPLGVRANLTKVSISGHSRGGKVAFALALGHAKAKLAVPLAAVVAVDPVDGMGVGKQTPPPILTGRHGSLHVGAPAMVIGTGLGELPRGSLLPPCAPRGVSHAAFYDELDGAAPACHLVVRDYGHTDMMDDDTPGARGMLTRTICRSGGARAPMRRFVAGATVAFLKKWVAGDAAAMDSITARPDQAPVALSVVEFGDEKAIA

SEQ ID NO: 241 - protein, 594 aa, Zea mays
MAMEEAGKMTCRKKGGLRTMPFIFANEVAEKLAVVGFSTNMLTYLTTQLHMPLAKAATTLTNFGGTSAATPLIGAFLADACIGRFWTIAAASVVYQAGMALLTVSAALPRFRPAPCKPGGAVACQEAAPWQLAVLYVSLLLNAVGAGGYRPCIVAFGADQFDESRAAERARSWGFFNWYYFCNGASMLLAVTAVVYVQDNVGWGWGLGVPAFCMGVSVAAFVAGYPMYRRLEPAGSPFTRLAQVVVAAVKKRRLPAADVDPALLYEDDELDAPISMYGKLVHTDQLSFFDRAAIVTDGDLVTLTDADSGKPSTAPVPDLWRLSTVHRVEELKSVIRMGPIWAAGILVITGSSTQNTFSLQQASTMDRRLAPGLSTFEIPAGSMTVFGLLAMLFTLFVYDRALIRVARRFTGLDRGISFLHRMGVGFAISVLATLVAGFVERHRRDAAAAAGATDAGTSPLSAYWLVPQYALHGVAEAFTSVGHLEFMYDQAPESMRSTATALFWLSISLGSYASTLLVDAVHRWSAGPGGANWLPDNINHGKLDYFYWVVTVLQVMNLVYYAICAKRFTFKPVQLHKKEEEEGGKALVELQEKV

SEQ ID NO: 242 - protein, 992 aa, Zea mays; identical to SEQ ID NO: 231

SEQ ID NO: 243 - protein, 150 aa, Zea mays
MAAASASLLHLATPTLTRSTRLAVRLPSAQLSRWPSGARIAAAQPPRAYKVTIEHGGESRVVEVEEDETILSRALDEGLDVPHDCKLGVCMTCPARLVSGTVDQSDGMLSDDVVARGYALLCAAYPRSDCTIRVIPEDELLKVQLATADD

SEQ ID NO: 244 - protein, 18 aa, Zea mays
MSGAWLWSNGGRPTGGGP

SEQ ID NO: 245 - protein, 266 aa, Zea mays
MGIGMEEFCIEKVEFDDKKEKKVVVVRGKFDAEKLCKKVWSKAGKIVKGIVIAEVWPIPAPPKECKPEAPKCCDCEKCKPKPKPEPPKCCDCEKCKPKPKPEPPKCCHCEKCKPKPEPPKPEKCCSACCHCKPKPDPKPLICCVCCHCKPEKKEEKKEEKKDEKKPAPAKTEYKFVPYPYPLPNPAMCPSWPWQCPPQQQCQCCQKPPPPPPKSPPKPPPCTCSSHAACVCGKTPPAVWPPMPPPVWPPPWGTCNVVTEESPCSVM

SEQ ID NO: 246 - protein, 657 aa, Zea mays
MPLPLPLPPLLLCVCVCVCLCLYLTHLPRLASSEPDADKAALLAFLAGVGRGATARARINWPTTPLACAGPGPGWTGVTCSPDGARVVALHLPGLGLSGAVQPGTLGRLTALQLLSLRSNNLSGPLPADLLRLPALAGLHLHRNAFSGALPPGLAGLAALQALDLSSNGFGGGIPGALTSLTRLVALDLSNNSLSGRVPDLGLPALQFLNLSNNRLDGPVPPSLLRFADAAFAGNDLTRPPAAAPPAAAAPAARTRRVRLSEAAILAVAVGGCVLAFAVAAVLLLAFCNREGRDDDDDDTGGAGGKGGEKKGRESPESKAVIGKAGEGNRMVFFEGPALAFDLEDLLRASAEVLGKGAFGTAYRAVLEDATTVVVKRLSKEVSAGRRDFEQQMELVGRIRHRNVVELRAYYYSKDEKLLVYDYYASGSVSNMLHGKRGEERTPLDWETRWKIALGAARGVAHVHAENNGRFVHGNIKASNVFVNRDGYGCISDLGLAQLANPIAARSRSLGYCAPEVADTRKASQASDVYSLGVLVLELLTGRSPVQVSGGRGSEVVHLVRWVQSVVREEWTAEVFDGALLRVPDIEEEMVEMLQIAMACVSRTPDRRPKVADVVRTVEEVRRSGTGTRPPSPPATAADADQSEMESSSSAAAAAAQ

SEQ ID NO: 247 - protein, 123 aa, Zea mays
MGKPAKIGEWGGYAGDRRDLRATPDRLIEVKVTADNSSCIRSISFIYIGADGKPYEEGPWGFGHAGTEYKSLKFVTNKRAYGPYGRDEGTPFRVKVMNNGHVAGFFGRSGDCLDAIGLYVNPN

SEQ ID NO: 248 - protein, 106 aa, Zea mays
MWSLVRRWRWGRRRRTARVVDESALGADGDTDGGAAAPAAGGAVVAPTLGGALARALLALACAIRFDGADVSATEEAWAVTGWRPRAADEVSHLMVRESMRYAIYA

SEQ ID NO: 249 - protein, 674 aa, Zea mays
MLVALFFLAALLAAPARSSSPSSNNGAGLQQPTLTVCSGHSTVATSGEFASFLAAVCAGAYGGGVAPHMSHSMSSYVAAENRTTMYGAAAGSTGSRGASAVPRPDLRIYGLTRCLAAGISCADCRRCLGGALAVVEREYNGSAGMQVLRLSCMARYESYPFYNTKSLARRSLASAMIDYFPLNVSSSFPASVGGVQPTPAPPGGRNPSPSPPAQARASPAPAAPLNISGPATATPRAAQPTPAPPGGRTRTPQHAAAATNDQTASGSSENKRKETSNRTKWLIASIATGLVAAFTSLALTMSIWYRRRKQQLYQRGHVIDAVPEDTMRDLEKNHLDSEEEEDEDGGRTSYQLYNYLVLEAATCRFSSRNKLGSGGFGTVYKGTLENGKEVAVKRLRDSKRTIQELEREISIVASLRHKNIVRFLGYCFQEEGRFFIYEYVPNNSLDKFWYKASSQWHQRLEWATWFNVILGVARGLKFLHDKGIIHRDLKPHNVLLDHNFNPKIADFDLLRMYDQQKTHESTEKAAGTFGYMAPECTSGRKLLLSIKSDVYSYGVLVLEIITGHKIYTFEGQNSEGLVEYVWQHWTEKRASDVVDCDLGMEGQEHGPWQALRCVHVALLCVQSDRSRRPTMGQVIAMLSSGDDGTEELPEPSRPAWKGTLLCEKLSQLYSQALQ

SEQ ID NO: 250 - protein, 438 aa, Zea mays
MDPEPFVRLSVGQLGLKLPGGNASKAAGRLCDCEIRLGGFPVQTAPVPLVHSPAFNLDPFTNAAVFSLEESDLKALAAPGCFRAPRSSCLEVAVYYLARFGASRCGVLACGRKRLVGVFRVELASSEWRDGKPVLLHHGWAGIGKGAARPELHLRVKLEADPRYIFQFDDEIALNPQVVQLHGSIRQPVFSCKFIRDRRPSQSDPLGGGQYWSSSSSEEQDMEMVRRERKAWKVVIHDLSGSAVAAAFMATPFVPAPGGDTVARSNPGAWLIVRADTTGSSDSWQPWGRLEAWREAAAAAASSGKDTVRLRLHLLPDRHDDCVLVSEAPLSSDKGGEFFIDMDRQAPSATAAEHCAASLGAACAGGGFVMSCRVEGEARSSRPFVQLAMRHVTCMEDAAMFVALAAAVDLSVKACRPFRRKPNKKAASPSPDHLELDT

SEQ ID NO: 251 - protein, 939 aa, Zea mays
MAKKPVEEALLAAADEQESLSVREELKKQLWLAGPMIAGALLQNVIQMISVMYVGHLGELPLAGASMANSFATVTGLSLLLGMASALDTLCGQAFGARQYYLLGIYKQRAMFLLTLVSVPLSVVWFYTGEILLLFGQDPDIAAEAGTYARWMIPLLFAYGLLQCHVRFLQTQNIVVPVMASAGAAAACHVVVCWALVYALGMGSKGAALSNSISYWVNVAVLAVYVRVSSACKETWTGFSTEAFRDALGFFRLAVPSALMVCLEMWSFELIVLLSGLLPNPKLETSVLSISLNTAAFVWMIPFGLSSAISTRVSNELGAGRPRAARLAVRVVVLLSVAEGLGVGLILVCVRYVWGHAYSNVEEVVTYVANMMLVIAVSNFFDGIQCVLSGVARGCGWQKIGACINLGAYYIVGIPSAYLIAFVLRVGGTGLWLGIICGLIVQLLLLAIITLCTNWDSEASIKFRDDDRPLLRAKVPIGVLGLPFLSGLAAGGDAKDLRFDLSTAFPSVPALRLSYRPNEPLQPFALSVRTGSPIRAPFALAAEFNLTSSNPPAFSLLFKPRIGDFAVASSVHSPPTPPPTSTPPPLAIKMVDLTTNSDDHDCEAHGNDLSFAENVFGANVAAATGTNGGGVGALLSGMRLTTRSVLPLWSKASMWFQWGLRVPPEIKATLADNGYGRKAGSLAISKLPLLVMNKIIIEHTPKVPSQSEADKKRKKDTPPAAEDEEFSLMKRQLDKLNAESTMLRRAVEDLSAEIGAGKGNDRKLPTAVPPQQHTLVSKPDRHFHINAKELVDSGTKPASNEASEELKKVLEGRRNCYTNPYVVSWPLNIMKQATTAISFSEVSPFDTILHLLQLMWSFKPCLYMDFGLASAVTTLWTCTDVTHLVHVLLQFRLVWCGKLIRYARAVAAHYVCSVKGLCFDLFIIRGRNRAFNACWRCTM

SEQ ID NO: 252 - protein, 483 aa, Zea mays
MSSAAPLLGDEAGGGEPAPRTPPPPSSWVGRVVDAAEARAQLGFAVPMVLTSMAYYGIPLVSVMFSGQLGDVHLAGATLGNSWATVTGYAFVTGLSGALETLCGQAYGAGLHRMLGLYLQSSLIMSAAASALVSALWWFTEPVLLLLRQEPEASRAAAAFVRAQAPGLFAFSFVQCLLRYLQTQSVVLPLVACSVAPFALHVALAHLMVNVLGLGLTGAAAAVSATFWVSCLMLLAYVLRSDAFSDTWRGFSADAFKYVLPTVKLATPSAVMVCLEYWAFELLVLIAGLLPNSTVSTSLIAMCSSTEAIAYMITFGFSAAVSTRVSNEIGAGNVERAKNAVSVTMKLSVLLAVTFVLLLAFGHGLWARLFSGSATIASEFAAITPLMVISIVLDSVQGVLSGVARGCGWQHLAAVTNLVAFYIVGMPLAILFAFKLDLRTRGLWAGLICGLTCQACSLLVITVRTKWSKLADAMKEEKANYVA

SEQ ID NO: 253 - protein, 476 aa, Zea mays
MSCRSRYEFAVYHKTSSHKPSPYLIANLRKHEALQKRCGPGTAAHKKAVRRLDSGEGVVDDDDGCRYLVYISYRGLGNRMLGITSAFLYAVLTERVLLVDGGKDTGALFCEPFPGTTWLLPQAGWFSFSPLSRLQGYEGGSKENLGDMLQSGGITVSADGNVSWSAPRPPLYLYLHLSGSYGFHDKLFFCDAHQRLLGEVPWLFMWTDNYIVPGLFLTPAFSDELEAMFPEKESVFYHLGRYLFHPTNRVWHAIKSYYHANLADVDQRVGVQIRVFQKKQPPRFVLEQILSCLRDVKLLSGTKTDAAGGGNGTSSSFSRAVLVTSLSSWYYDRIRDEYGGRISGGVHQPSHEGRQRWRDAAHDMRALSEIYLLSMCDVLVTSGYSTFGYVAQGLAGLRPWVMPRAPMWAADWREELDPRDMPCRRADSVEPCFHAPSAYRCAAGRDVDLGKVSPYIRRCVDVKYGINLVNESSGQW

SEQ ID NO: 254 - protein, 388 aa, Zea mays
MGGGDDRRAAALQRSSSPWSVGERWRAHAGMVLVMLAYSGYHVLAKSVLNVGMNQVVFCVYRDLLALLVVAPVAFLRERRVRPPVTPQLLASFALLGFTGLYGNPLLCLVGLRYTNASYAAAFQPSIPVLTFLLAAIVGVEAISVFTKDGILKVTGTAVCVSGAILMALYRGPSLIALLRSMPTAWTSAPYHPATPDWFTPAVPVLEQGVEAWQLGVLCLIGNCLLVAVYLVVQAPVMIKYPASLSVTAYSYFFATTFMVLTGVCATSGLHEWALTKAEVIAVLYAGIVASCLSYSIMTWANKVLGPSLVALYNPLQPAFSTALSTVFLGDPVYLGSVIGGVSIIAGLYLVIWARYNQGQRAPTDGCLDPLIIVDNPRIHKTQESPFV

SEQ ID NO: 255 - protein, 263 aa, Zea mays
MAPGGSGERWSLAGATALVTGGSKGIGQAVVEELARLGARVHTCARSAADLEECRRRWAEKGLRVTVSVCDVAVRADRERLVLDTVSAAFDGKLDILVNNAALLLLKPAAEWAAEDYARIMATNLESCLHISQLAHPLLLNASVAGGASIVNVSSIASVLGFPQEVMYSVTKGGLNQMTRSLAVEWACDRIRVNCVAPGVIMTDMGKELPAALVEQERSRIPLRRTGEPEEVASLVSFLCMPAASYVTGQVIFVDGGRTISGA

SEQ ID NO: 256 - protein, 106 aa, Zea mays
MAPSISVGAAAPSRAAGASTKKSADEVELLRRRNAELEREVAALRLELGAARRRAETAEEAEERLCVQLGDAEVEALELARAYQAHVHELARELAAARAAPARPAR

SEQ ID NO: 257 - protein, 852 aa, Zea mays
MRPLRRSSGGLAALGCCLFLLPLLSRGADMPLGSTLSPGNSATWTSPNSTFSLGFTASASSPSLFVAAITYAGGVPVWSAGNGAAVDSGSSFRLSSNGDLQLVNGSGAVLWSSNTGGQNVSAAAVQETGNLVLKDKTGAALWQSFDHPTDTVVMSQNFTSGMNLTSGSYAFSVDRATGNLTLRWTGAGSTVTYFNRGYNTSFTGNKTLTAPTLTMQTNGIVSLTDGTLTSPAVVAYSSNYGESGDMMRFVRLDADGNFRAYSAARGSNAATEEWSAVADQCQVFGYCGSMGVCSYNGTSPVCGCPSLNFQLSDPSKPRAGCTRKLELASCPGNSTMLELDNTQFLTYPPEITTEQFFVGITACRLNCLSGGSCVASTALSDGSGLCFLKVSSFVSGYQSAALPSTSFVKVCSPPLPNPAPGSAAAPSAGGSGFRAWVVAVVVLGVVSALVLCEWALWWFLCRHSPKYGPASAQYALLEYASGAPVQFSYRELQRSTKGFKEKLGAGGFGAVYRGVLANRTVVAVKQLEGIEQGEKQFRMEVATISSTHHLNLVRLIGFCSEGRHRLLVYEFMKNGSLDAFLFGDAPPGGKMPWPTRFAVAVGTARGITYLHEECRDCIVHCDIKPENILLDEHFNAKVSDFGLAKLVNPKDHRHRTLTSVRGTRGYLAPEWLANLPITAKSDVYSYGMVLLETVSGRRNFDVSEETRGKKFSVWAYEEYERGNLAGIIDRRLPAEDLDMAQVERALQVSFWCIQEQPGQRPSMGKVVQMLDGVMELERPPPPKSSDSFFSTTTASGGNSSMVSTVASSAAPPVAPSTSPNLEQEMALGRSESARNRDRVTRQLLSPQPYMTM

SEQ ID NO: 258 - protein, 139 aa, Zea mays
MAYVLACAADQRAGRKKKRSMASNYVDTTGEEGRFHGPHSHSTSTTPTGGAAAAAASPRNFRRSFSSASSAGHSHGGGGGGAKCVCAPATHAGSFKCRLHRTNSQGHGHGHPHPSPPASPAAPAQGVSSSASSRTVEAL

SEQ ID NO: 259 - protein, 738 aa, Zea mays
MATSRCGKQRQPLLHSPTPADANGGGAAKRRRFVSFLAVTAALVASYHLLVPTNSSHYHALFLSLGSNATAAAHLRALTLRPHVAGTEANAATARYVLHAFSSLSFPAHITPYSVLLSYPVHRSLSLAAAPGLAARPFSLVQETYKGDPYAEAAAEVLPTYFAYSGSGSVTAEVVYANYGHNEDYAYLASRGVDVVGKVALVRYGDIHCEDMVRNARAAGAAAAIVYTDAKDFGGSAAKGEKRKWFPDARWLPPTGVQVGTLYYGNGDPTTPLWPSCAAGDDCERLSMEELDGSEEMPGIPALPVSARDGETILKAMGGDVAPPKWQGGDGAPVYRLGPGPAVLNLTYIGNETLATIENVFAVIEGKEEPDRYVIIGNHRDAWTFGAVDPNSGTAAMLEIAERLSKLQAKGWRPRRTIILCSWDAEEFALIGSTEWAEENMDTLASRAIAYLNVDISVFGPGGLMPRATPQLDELIKEASKMVPDPDEPSQTLYDTMMRHHPPITRVAGAGTDFAAFVQHIGVPSLDMSYGLFEEYPVYHSLYDDYVWVERFGDPLFHRHVAVASVWGLIALKLADDEIIPFNYVSYASELEECTKDIVDKCKGFPVSFSPLQNSIKQLESAATKIYKEKKLLQAENWSLKTSKYTLKVREINDRLMMAERAFTNREGLVGRPWYKHMIYASSDQDDWGTKAFPGIVSAMDKAKKSNTTETWRLLQHEIYRVARAVSKASAVLDGKLT

SEQ ID NO: 260 - protein, 594 aa, Zea mays; identical to SEQ ID NO: 241

SEQ ID NO: 261 - protein, 108 aa, Zea mays
MASNYVDTGAEEGRFHGHHSTTPTSAAASPKTLRRSSSSAHSHGHGPKCVCAPATHAGSFKCRLHRSSSHGHGHGHGSNPASPPSPATFAAAPPPAAAASSSRTVAAQ

SEQ ID NO: 262 - protein, 200 aa, Zea mays
MAGEEGLKVLGLQVSPFVLRVCLALNMKGVSYEYVEEDISNKSELLLKSNPVHKKVPVLIHNGKPICESLVIMQYVDELFAGRPILPTDPYERATARFWAAYADDKLFPAWYGMVKAQAEEERAEKAKETLAAIEHMEVTFAKCSGGNAFFGGDSIGYVDIVLTCSAPSCSGSRRCAGFSTWRSLTLARLRCWLRGRSGL

SEQ ID NO: 263 - protein, 486 aa, Zea mays
MSRDAHLGVGVEGDAAEEKNAAADGGEGVGFRSGGGGGHKLSLVPLIFLIFFEVAGGPYGAEPAVQAAGPLYALLGFLIFPFIWAIPEALVTAELSTAMPGNGGFVLWADRAFGPFSGSLMGTWKYVSSAINGAAFPALCADYLARVAPAVSGGGARVATIVAFNVALTFVNYTGLTVVGWSAVGLGVASLSPFLVMSGAALPKIRPRRWRVVAAERDWKLFFNTLFWNLNYWDSVSTMAGEVERPGKTLPKALVSAVSMTSLGYLLPLMAATGAIDVAPESWGNGFFADAAGMIGGRWLKYWIEVGAVLSSIGLYSATLSSAAFQLLGMADLGLLPRAFAARAPVFRTPWVSILATSAIILGMSFLSFNSIVAAANFLYSLGMLLEFAAFVWLRVKRPAMARPYRVPARLPAAVALCLVPSAFLVFVMAIAGWKVYAISAAFTAAGVAVYYLMRFCKARGCLRFSDGGDQGTTAVYQDGSNAGDV

SEQ ID NO: 264 - protein, 457 aa, Zea mays
MDQIATPDETAHASAPSVHKLFDAKLGHHSVMDGTLASTSQSSNIKTQLIRSSSLSRSISVNLEKRSPESDPESPQSHVSHPKFAEPMFSNSSTFCTSLFSSSSTTEPCRQMGTLPFLPHPPKCEQQVSAGHSSSSSLLLSGDTGLDVAEQSDDLNDLLNLSGDASDGSFHGENNALAFDEQMEFQFLSEQLEIAITDNEKNPHLDDIYGTPPQLSSLPVSSCSNQNLGSPVKVQLSSSQSSSSSATANKSRLRWTLELHERFVEAVKKLEGPEKATPKGVLKLMKVEGLTIYHVKSHLQKYRLAKYIPEPKDDKKASSEDKKAQLGKGSIDSSKNKNLQVAEALRMQIEVQKQLHEQLEVQRQLQLRIEEHARYLQKILEEQQKAGNVPLKAPTKAQATKSSPESTSDERTESEVDTISPRPPKNRNPGVDAECKSPGRIKRTKVQADLENEGLCS

SEQ ID NO: 265 - protein, 476 aa, Zea mays
MPMAAAAGAGEPGPRSEASGFGSGCNHLRPRRGPPPPSPSPAVGKPLPSGAVPRHAFVFDGEGGFSEAPWGLAVSGSSRTGEFTWHHVELPRSAGAAAAKPLHHAQALIELLCPPLTLQEILAFVATGPHCASSGDGALLLRVSAPGPVGSAYALRLAARVTESSVVTVSVGGVPRLAFGTRQASLLSEVPLGVAASLSDEGHGGGRAVDGGVIIDERLLESLLAMNHADGAHTDNPVPRTVSNLLVHVLGTHVDHVHDIVTRLEMDLDAVELQLDKGGHFLRKLLLDGRRFPKMHLDLQRLLQVVSHCEQVFPRVKEKCASKSWFATGDIAALEDLIGRLRRLKENLGFITNRITTLQASLDSWQSEQINKSLYYLSFLSIIFLPLSIVTGVFGMNVGGVPWTGQNKNPKNRDGFMNVMLICVAILLLLLLCFLFPSLYSHVTSWRTRRELTRSNSQNRRHLKLFKGHKEGYMRL

SEQ ID NO: 266 - protein, 273 aa, Zea mays
MDDDDDSPPHESAAAAAADLSLTLAPAPALAPPAPPPALPAVASDGGVATARVDGKDVRLFPCLFCNKKFLKSQALGGHQNAHKKERSVGWNPYFYMTPPHPQPNAAPASPTAPPPAYAAGGLLPAPYAAHVYAPVPAAPPPPSFPIASHGSSGGLRYYAPPHEAAAAAAADAGTGAPTTAGVVLAPRARYATATHQQQAQQPGGGGRDDLIDLLNWRRGSHGAPAAAAATASPASTTTTLTTSYAGAPDGGTSTNDDDDADDAGELDLNLSL

SEQ ID NO: 267 - protein, 238 aa, Zea mays
MAAPPTVRGYGPASPSSSVALPRARSRVPASLVPVPTRRAPSVRLRAAVADVPRGGLQLQRREVEVLSGTVFGREEDEVLEKVGEEKVDGWIRESIAEIVRHIGEAPFLVHLFSSGDGDGEHVTVRRETAAPESWPDVRRRWGMGGQRRPDGVILVEQVAAVAVDGGASASEAARQVWGLVVQARGMEHASCYVLDTCRVRSSAGFCTHFCLARAKCFGDPVELQLRNAWLNRLAGRR

SEQ ID NO: 268 - protein, 495 aa, Zea mays
MGSVPPAEGDRRQPQQQPHVVMIPYPAQGHVTPMLQLAKLLHTRGFHVTFVNNEFNHRRHLRARGPGALHGAPGFRFTAIDDGLPPSDADATQDVPKLCYSTMTTCLPRFRDLIVRTNAEAEAEGRPAVTCVVADSIMSFGLRAARELGLRCATFWTASACGFIGYYYYRHLVARGIVPLKNEAQLTDGYLDTVVDWIPCAPKDLQLRDFPSFVRTTDPDDIMLNFFIHEVEAMSQASAVVINTFDDLDATLLHAMAKLLSRPIYTVGPLLLTVRNNVPADSPVAAIGSNLWKEQEAPLRWLDGRAPRSVVYINFGSVTVMSNEQLVEFAWGLANTGYTFLWNVRPDLVKGGDSAGAGLPPEFLAATEGRSMLSTWCPQAEVLEHEAVGLFLTHSGWNSTIESICGGVPMVCWPFFAEQQTNCRYKRTEWGIGMEIGNDVRRGEVKALIREAMEGEKGRDMRRRVTELKGSARTEHTQLAHRTVYRTCPVHHRTA

SEQ ID NO: 269 - protein, 606 aa, Zea mays
MVMGRPSNSHGGGGDEERLPLRGVLETSPSHHAAVQAKDKEARRGGSRLWRASVRAGLLLCLLTVPAVLLLLWWQADSSPQWVFDFEPPEEDDDQDIQDDMSDDLSPSPQIEYDRLLGGLLVEGFDDKSCRSRYRFARYHSSPSIPSPYLIERLRKQEALQKKCGPGTRAYREASKQLKSGQSMSINATDDCNYLFLIIHAGLGNRMLEITSAFLYALLTNRILLLDRYKEIADLFCEPFPGTSWLVPSDFPLNDDEFGQSSAESYGNMLQNKAFGGGTDRSLVGNRLPPYVYLHLDGNYGFHDKLFFCEDDQQFLRGVPWLVMRTDMYFVPSLFLVPAFQDELGRLFPEKDTVFHHLARYLFHPTNGVWYSVTRCFRSYLAKAEKRVGIQIRIYETKGILQRNGPFPHILNQILSCAQNEKLLPEISMAEGAADGTRNNRTAAGSGTRNNRTIAVLTTSLSAWYSEQIQEKYDEQSAVDGVSVRVFQPSHEEYQRSRNKGHNMKALAEIYLLSMTDVLITSGFSTFGYAAQGLAGLKPWIMLKSENHVTPDPPCVRAMSIEPCFHQAPFYDCKARKDTDLGKVVPYVRHCEDVSWGLKIVDQTHL

SEQ ID NO: 270 - protein, 472 aa, Zea mays
MSEKLASKDINECKTQHICKENEVCNNVVGSYYCTNCPDKTEYDAATNQCKATKQLGLVLGVIIGLCVGFGILVSCLGGMLVIRRWKRDIQKQLRRKYFRKNQGLLLEQLISSDENARNNTKIFSLEELKKATNDFDTSRILGRGGHGMVYKGILSDQRVVAIKISKIMEQGEIDSFINEVAILSQINHRNIVRLFGCCLETEVPLLVYDFVSNGSLFEILHAAEASNDFQLSWDDCLRIALEAAGALYYLHSSASVSIFHRDVKSSNILLDGNYTAKVSDFGASRLVPIDQTHVVTNIQGTFGYLDPEYYHTGQLNEKSDVYSFGVVLVELLLRKKPVFTNETGTKQNLSNYFLWEKKMKPVTEIVASQVLEEATEEEINMVASLAEKCLRLRHEERPTMKLVEMTLQFLRAERLNSSSDVPASKQEVEELLGTSTSYSDTLLDNKAATTSQQSKGYYSLEQEFASTTLPR

SEQ ID NO: 271 - protein, 403 aa, Zea mays
MPSSASARGGRGLLLPAAAEAVVVLILGAVAPAAGCYPRVFSFGDSLADTGNYPFVYGNDSGSGGAALRPPYGETFFHRATGRASNGRLVVDFIADTLGLPFVRPYLSGRSAEDFASGANFAVGGATALSPDFFRARGFDTMGNKVDLDMEMKWFRGLLDLLCPGNLAGCSDMMNQSLFLVGEIGGNDYNGPLLSGVPMEKIRAITPSVVAKISSTISELIRLGAKTLVVPGNLPIGCIPDYLMIFKSNKEEDYEPQTGCLRWMNEFSQYHNKVLVEQLKKLRKLHPGATIIYADYYGAAMEIFLSPEQYGIEYPLVACCGGEGPYGVSPSTGCGFGEYKLCDNPEKYGSWDGFHPSESAYRAIAMGLLLGSYTRPSITSTTTSCPQLMELGSSAEYKPLYDL

SEQ ID NO: 272 - protein, 228 aa, Zea mays
MVRGKTQMKRIENPASRQVTFSKRRNGLLKKAFELSVLCDAEVALVVFSPRGKLYEFASGSAQKTIERYRTYTKDNVSNKTAHQDIEQVKADAEGLAKKLEALEAYKRKLLGERLEECSFEELHSLEVKLEKSLHCIRGRKTQLLEEQLHKLKEKEMNLRKSNEDLREKCKKQPPPPPPMLMAPPPPPAPAAIDHTGPKDVGMDVETELYIGLPGRDYRSNNKDMTAQ

SEQ ID NO: 273 - protein, 973 aa, Zea mays
MTGVEPAIIGAIANLAAPVLPIAIKGIQGALKKRQVRDSDVETLKSQLSYIQGIIRDTRKTIRSSQDPSDRLQSWAGYLRCLAYDIEDLIEGRRAGTMTGAKLNGKITIIQDLIRCVQSYPEFMAVPTNEAPSQGAASSSTTSSTQGFPLADLVGKKEDLDELLDLLVRRPDNELDKVLKVMVISVVGFGGIGETKLCHTVYTDVQESRRFSLHAYVSAAGKDCSIVLEEIIEQFRLQEDPQDSSGGFFHRFAGAFPGARRTDQVHGLPEYLQRKRYFVVVDGVESEELVSGIASAFPDNSMGSRIIMGMRTAVGRDAERCVGHHHKMWPLEDKQSVVCFLNEAERRRRRHEQDDHSSFIRFQEQDHSSSCLHKVCDGVPLALVSVCEVRRGSIITAAVEEQDRWPHRMPKVLDHSYDGLHIRGAGSCPNQYIPYLQACLLYFAMFPRGNHVKRGSLIRRWQAEGLEFGGSNQAAENLKALVDRNFVWPLHASLNEHAKTFQPPGVVLNYISRRSQEEEFILRSCPSGELNPNYSRRLCLHPAEEEEGEPQPVVITNGSVPPRLRTLAVSWGQQQASRIAECEQLRVLDLASYNGLQPDQLEEICKKLKLLKYLSLLPDIITQVPSSMSNLQCLETLEVGEVNGRAAVLVPIQVLELPRIKHLIGKFELIDNFNGLPIRAYPDALVPKAIKESNLETVSGFFTRRGQGFPPLMRHIRQLRKVKIWFYRDAEPKYLASYLPKAITKFLRNDNVHRSLSLDFQDGPRQTEILQACVAEASGNLYSLKLSSGTNLSRIQLSVIATNKLTGITKLCLSRWKTITLDAEFLNELTKLASLTYLKLDAETIKGTYDQNPTPGGNNQEKVVIETGHIANLRRMCLVARQTLPDIQVKPTALQRLVSLHLISETDDYCPSANVICKANPQDDNEPAPFTSLQEVSLNATVPENLRDSWRNAARDHPKRPRILFIQHPHRAG

SEQ ID NO: 274 - protein, 435 aa, Zea mays
MTLTTVAFTVRRGEPALVGPAAPTPRETKRLSDIDDQETLRGQMPFLFLYRGGVHVRADDDDPACVIRRALGEALVPFYPLAGRLREVEGRKLVVDCTGEGVLFVEADADVRLDELEATGLRPPFPCMDQLLFDVDGSSGVLHCPLLLIQVTRLLCGGFVLALRLNHTICDAIGLAQFMSAVAELARGLPAPTVAPAWSRELLEARNPPKPAFPHREFDVAPPPPPPPPGDMVTRTFTFSPADVAAIKRALPLALREAATTFEALTAALWRARTAALAPPHDAEARLVSIVSFRGLPELALPAGYYGNACVPVAALTTAGALLAGSLGDAVALVRGTKAAVTAEYVRSTLDLLVLRGRPCVALANLFLVSDNRRAEFHRLDLGWGVPAYGGPAVALFGLSFFVQAGNGDDVAVLMALPRPAMDHFASEVETLLKA

SEQ ID NO: 275 - protein, 576 aa, Zea mays
MTSKWHIGMESPTHSKVQTPKCRNQCHVEVEQPFSSSCIACMKLYEKLKADIEAAKNDETISGSWSKDKRQNHDAYVEIIEDGDGVEEIPALVYVAREKRRAWPHHFKAGALNALLRVSGVVSNAPYVLVLDCDMACNSRASALDAMCFLLDRRPPPDSLAFVQFPQLFHNLSHKDIYANELRYIFGTRWFGLDGVRGPPLSGSGFYVRRDALYGATPTADFMPDATAVAELKTRFGHSDRLVASLRSPGVPPEAEAMMSLAALASCAYEAGTAWGAGVGFMYQSVVEDYFTGFQRFFARGWTSAYCYPEPRPAFLGSVPTNLNDVLVQNKRWMSGMLAVGVSRRHSPLACRPLLRASLLQAMAYAYFGFAALCAVPVLCYATLPQLCLLRGVPLFPCPAATAAAFASSLLQHMAEVCVSRRGRLDLRTWWNEQRFWVLNALTAQLFGCVSAAQELLGARALDFDLTSKAAVDGSLYQDGVFDFTGCSALLLPATTLSVLNAAAIVAGTWKMSSSSSSSSGGFHFAPQLFLMCYGAALSYPLLEGMFLRRDPARVPPRITALSVALAAVLLAAMLG

SEQ ID NO: 276 - protein, 520 aa, Zea mays
MAIGAFVEGAPADGGEGYSGRVTPFVVLSCVVAGSGGVLFGYDLGISGGLTSMDCFLKRFFPKVYRQKQDSKVSHYCEFNSELLTVFTSSLYIAGLVATLAAATITRRYGRRTSMLIGGSVFIAGSVFGGAATNIPMLLMNRILLGIGLGFTNQSIPLYLSEMAPPRYRGAINNGFELCISLGILFANVLNYFVIKITAGWGWRISLSMAALPAAFLTIGAIFLPETPSFIIQRDGNNTDKARVLLQKLRGTASVQKELDDLVRASDLSRATRYPFRSILERKYRPQLVVALLVPFFNQVSGINVVNFYAPVMFRTIGLKESASLLSSVVTRLCATSANVVAMVVVDRVGRRKLFLAGGVQMILSQFTVGAILAAKFRDYEEMGDGYAYLVLTTLCVFVAGFAWSWGPLTFLVPAEVCPLEIRSAGQSIVVAVVFLMTFVISQTFLEVLCRVKSATFFVFGGWICLMTLFVYLFLPETKKLPMEQMEQVWKTHWFWKKVVGEEADRKEAGAGNIALSGLS

SEQ ID NO: 277 - protein, 376 aa, Zea mays
MASSSLPAPAAGRAELLKAFDDARTGVRGLVESGVSSVPELFRHADPYASIPLAPPGVSIPVVDLSLPPHLAAAAAASAARTWGFFHLVNHHHALPAAAAAADDDYPERAFAAVRAFNELPAHERAPHYSRAVDGGVNYSSNVDLYNSPAASWRDTIQILLGPNRHPDLADRIPAACRAEVLEWEVRATAVARALLRLLSQGLGLRPEALEDASCADGKLMVCHYYPHCPEPERTMGIVPHTDPGVLTVLAQDGVGGLQVKHQDEDGKISWVDVKPVPGALVINVGDLLQIMSNDKYTSVEHRVVMNTREEPRVSIGIFFSPGKRGDSVFYGPLPELVSSENPPKYRNFTMSEFYGTFFSRDLASKALLDNFKLSP

SEQ ID NO: 278 - protein, 310 aa, Zea mays
MQDDPFYIERRNTNMSTGFGGTKGSKRVVAPNVEDQVGRVTRQKTKELSLVEKDIHGLTANTDEHTLISANFPAHHDDEIQMCDEGKKTGQFAIDTKNKDVKYACADLMRCNQRQMRYKLKKAYFNGVAADKVRTTSPLSTMTDEQWMQLVNMWSTPKHKEKCVNNKVIRGKVRFQQKTGSRSYIAHMHAVDTMEALVAEPGVEGKESKTPTEAVAQVLSSSKFLYNIGLVPATKKSCNGGDPTRVAELEAELESEKQNSLEVRAQLDALKKKVEESEEARAKELEKINDLQKGADETNALLRRLFSLNK

SEQ ID NO: 279 - protein, 330 aa, Zea mays
MAVEAHSLLLAGGHKQLTSAGWPWTTGDEARCATARPSHQQAFQLQQASCVGVGVGLPAAAPVSSAAAAPPAPMIAQQYAAGGRLFVGDAAESGVTFGGGGAVQQEAPRKRKRAEQGQTPPPVLGTGAADVAAQFQQQLVDVDRLVLQHTAKMWAGLTEQRRRHARQVVATVEAAAAPRLRAKEEEIRRMRRVNWALEERVKSMYVEAHMWRDLAQSNDAAVTALRGELQQALDAQQTRRRADDADSCCCGENDVFITGAGAAENEEEAGTGTSSSGHVRGACAVCGDNAADVLLLPCRHLCACAPCAAAARACPACGCAKNGSVCVNFS

SEQ ID NO: 280 - protein, 195 aa, Zea mays
MGVGVAGTAGMSHGPAAPSPRSSSTMPAAGQSPVPYLFGALAAMLGLIALSLLALACSYWKLSGGGQEAYDDDDPERQAGAGAGAEARPGHGKAAPTGKGTGERWREHAVVIMAGHERPTFLATPASSRRGPNGARGVGVSVDSGPGDSEDGDEARCVECGARSWPARAADSEGEPGRTEQSGASGSSVTVISER

SEQ ID NO: 281 - protein, 184 aa, Zea mays
MSMLTSILGRKHQPPPQQQQQQKGGGARTGTGAGAGTEAAAVEPVSIDIAEQGPLVDAITLAAFAAPALGLPPFATASMDWKETPTAHVFMADLPGLRRDEVKVEVEEERLLRISGQRQRAAEEKGDRWHRVERSSDRFVRTVRLPPNANTDGAQAALQDGVLTVTVPKDNDRKAYGRLITITN

SEQ ID NO: 282 - protein, 537 aa, Zea mays
MEAALTQQAAATATATPTRWRCVGDASLASHGQGQQRAGAVRLGAARRAVSGAVRASSSRHLGPVRALVSEAAGGERAAEGEGMDTAVRLFVGLPADAVVSDGRGVGRPRAVSAALRALKLLGVDGVELPVSWAVAQPGPGGWFEWAGYRAVAAMVRDAGLDLRVSLRTDGDALPGWVADAAAADPDVLFTDRSGHRRMGCLSFAVDELPVLVGKSPLQAYEAFFRSFAEEFDDLFGSTITDVTISLGPNGELQYPSYPPGNQGSRGFDGVGEFQCYDKYMLARLKRHAESSGQPLWGLSGPHDGPRYDDESPESSAFFRELGGSWKSAYGEFFLSWYTGELLAHGDRVLAAASSAFRGKPVELSAKVPLLRGPGTGPSPADATAGFHGGYGPVAEMFARHGCAVIAAGVEARPDATAEERLAQVKAACTEHGVHLAAESAPLAVARGSDGDGPTRVVWLSAGRTRPCQFTYQRMGAEFFSPGHWPLFVQFVRALECPEEAHEDDLPASADGGERLTVPSAAAAAPKDQATREVQTV

SEQ ID NO: 283 - protein, 254 aa, Zea mays
MDELVCPAASSCSSPSPTSFFAAGHVPELEFVSWDVPEEWMEGTDWFDEPLDGDEGSRSAGNDLSGEPPAPAPKRRRGRKPGPRTNGPTLSHVEAERQRRDKLNRRFCELRAAVPTVSRMDKASLLADAATYIGELRDRVEQLEAEAKQASAAVTTAVAAASHSFAPLQEKLGLEVRMVAGLDAAALRLTTSAARHAPAHLMLALRSLDLQVQHACVCRVGGVTVQDAIVDVPAGLRDERCLRAALLQRLQPSG

SEQ ID NO: 284 - protein, 390 aa, Zea mays
MEMKDDAVVLAARPRPDAAAAVVVVTLRRMNSSGDGRMSYADNSGFQRAIASVTKNARQELAAALYRARGRPSSMVIADLGCATGPNALLMVLDAVEAVLAVAEESHPSPPPQLHVFLNDLPANDFNAVFRLLPSSPLAATGCCFVSAWPGSFYERVFPEASLDYVVSSSSLHFLSMAPTMRTEHPNRGRVYVSESGPAAVLDAYRSQFHADFLAFLSCRADEMRPRGLLILTFVARRTARPTAHDCYLWDFLADALMDMAADGLVDEEQVHAFNVPFYGPCLDDLAKVIAREGSFTVRTMQLFDISRRCLLLQSASDDDDDLPQWLAMETTSTVRAVVEPMLRAHFGLEAMDGLFCRYSLRLEEYYRSNTSRNKDDLTNVFLVLEKKLH

SEQ ID NO: 285 - protein, 482 aa, Zea mays
MMQVHPSSYYKMKRRIRDMLLKKVEPSSKLQTIDAMQRLGISYHFEDEISNILYSISNESTKAQYTYDNIAFTALKFRLLRENGFPTILGPLGYHNYEKFITKTPSLEDANTLLLLYEASYLAFGDEEKLDVARTFSAKALKQLMPFMLPHLREGVAHSLELPLHWRASRLETRWFIDYYARDRNMCPLLLQFAELDFNQVQYEHQKDLAVVTRWWKKIGLGEKLPFARDRLMECFHYANGIVWDPKLGTCRQMLAKVSNLIVYLDDLYDVYGTIEELVLFTNAIARFDLLEWHLTCSWYDICLAFLVEAKWHHGNYRPSIQKYLENGWVSSSAPLLLLHAFAMLDSVVNMSTISPLQTKLRLVQHVSLILRLCNDSATHLDELGRGDAPSFIALHMIENGGNENDSRKAMQEHILKSWKVINEEAFDSCQYSMPFNKACIDLARISHCVYQGGDGFGTPNGLKKKQIRDLFLDPIDICNKQ

SEQ ID NO: 286 - protein, 383 aa, Zea mays
MHGRRHLAASLTRALIQAPSRSISSTPSLLQTLDPSVPSPPAAGAGRLAELRRRLQADAPSLGDFTYSVEVGTRQRPLPKPKWMKETVPGGAKYAAIKAKLRELKLHTVCEEARCPNLGECWSGGETGTATATIMILGDTCTRGCRFCNVKTSRTPPPPDPDEPSNVAQAIASWGLEYIVITSVDRDDLPDQGSGHFAETVQKLKALKPEMLIEALVPDFRGDPSCVEKVATSGLHVFAHNIETVEELQRNVRDYRANFKQSIDVLEMAKEYAPPGTLTKTSIMLGCGETPDQVIRTMEKVRAADVDVITFGQYMRPSKRHMPVSEYVTPEAFEKYRALGVEMGFRYVASGPMVRSSYKAGEFYIKAMIEAERAKGTAADSSA

SEQ ID NO: 287 - protein, 282 aa, Zea mays
MTAVALALPTDDDKDGGRRGVDHSPTAPAPPPPPPPPQELVMVARAVQRLVARNDAVVPPAPDGRGGGRRLGMRAFEAAEGAAAPRIGVPEYLERVHRYAALDPECYVVAYAYVDMAAHRRPAAAVASRNVHRLLLASLLVASKVLDDFHHSNAFFARVGGVSNAEMNRLELELLDVLDFAVAVDHRVYRRYREHLEKETTLMMLRRDDGHGPPVPVPGSGAAPTKSRTAASSVVKPPLTEDRRRPAEAGDADGGGEHDDRRKLPNSATAAASLRELWAFDY

SEQ ID NO: 288 - protein, 687 aa, Zea mays
MASVYTAPRAPLPTVASSSSSARQVDPNPSGSRFLAGRRLRRAPWVCYSARSPDADAGDEQRRRGWDAMLHDAFQGAVRRWSEYVSNYWPLPPSVKEAGTGKRVGSSYDEEVMNGDEEEMKVGEEEGKWSWERWKRHFALIEESERLVDELQLQLQASVYREDYRSAHKLRLAIATIVKNDTVGRAVSDLNMAIDEERYKDAAYIRDHAGTGLLGWWSGISGNLSDPYGLIIRISAEHGRYVARSYDTRQLTSDSSGLPIFEIYFAEANGGYNLQAVHLKPDDSDSDQVPNMLREKLGMDSINISSSSVGSKHEEFDGSVNMDDKDSDDSNIDAGPGSKDLSSDPTAVPRIKILKVVPMQNVDKDYIINIFDQISEENDDPEVENESSEDAGDEDNSGVAETVSAEENGDESGDESDIEPLVSIDFVIENNDDYASHPSAEAFERMPARLEKRDRFSFSFYTEEYSKKLDAGKAQQTSKKTVRLHTDQQDYDGFVELDRVKLSGSNKKLSILQLGIKRNNKVQKKLHGVTHFSRIQMPISSDPLTGLYLTASGFDSEILSLQRKFGQWREDGPSEEHSDLLFYEYVEAVKLTGDNLMPAGQVVFRAKVGEHYRLPHKGIIPRELGVIARYKGQRKIADPGFQNPQWVDGELLILDGKFIRDGPVIAFFYWTSNVHLFEFFRQLKLPD

SEQ ID NO: 289 - protein, 180 aa, Zea mays
MEAVVATTTTRVSFPLLPTAGRPLLPPVLARPRRGFASVSATSTSGAGGGGGRSSAGGCGGDGGGDDSGAGAAAAAAAVAALGESEQQEDGDSDAIVLHVGGMTCGGCADKVKRILESQPEVAAATVDVEKATAIVWTTPEAKATKDWQKQLAEKLANHLTSCGFQSHLQDEGEAEQTDA

SEQ ID NO: 290 - protein, 376 aa, Zea mays
MPPAIPSLVHPSRVRILHPGGSHIHGPVVYWMLRDQRLADNWALLHAAELAAASTPAAPLAIAFTLFPRPFLLGAHLRQLGFLLRGLRRLAADAHARGLPFFLLEGGPAELPSLVRRLGASALVADFSPLRPVREALDAVVQELLRDAANMAVHQVDAHNVVPVWTASGKLEYSAKTFRSKVNKVINEYLVEYPEVPQWAPWCMEQPKSVDWDALINSIFSEAENVPEINWCEPGESSAMEVLLGSKDGFLTKRIKNYDTGRNDPTKPHALSCLSPYLHFGHISAQRCALEAKKRRHLSPKSVDTFLEELIIRRELADNFCYYQPQYDSLAGAWEWARKTLTDHTGDKREHIYTREQLENAKTSDPVCISIFLVLY

SEQ ID NO: 291 - protein, 671 aa, Zea mays
MDADTFPVGLRVLAVDDDRVCLKILERQLKCCNYNTTVVTDAQTALDMLRERKDGNQFDLVISDVVMTKMDGFKLLELIGLEMDLPVIMLSANSETQTIMKGIKHGACDYMVKPVRLEQLRGIWTHVVKNSKIDPRNNIGSDSDDVVQKLPSGDGDKGEKVGETRQKKYPKKNKKTVDVADEDNEKTSAQKKQRVQWCGELHQKFVQAVRQIGIDRAVPKKILEIMDVEGLTRENVASHLQKYRIYLRKLGDGTLRSSSPFADETEAFRRNMNVPSFISSSSSSNHFAKMNSSSLIGTETLLPTESVYIMSPQKNLGISRSNMEPVSHGVNLPKDVIPMPVQDISRFISSGKSYAPVWSDGLLGRSQCFPSGPSGSSFANISNSVVLNASKPFSVDISGRSLANGSNDRPPLTSNMCFSSSHSCSSYASILGGKILGSSRRIPFEDIADGEMLAPGNLPLQSPQLVKQPSSAGLFNEVARDVHQFAGLSNSWKVAVPPRFSDLGHNVGTSEGHSQGNIFKINRLSRLARSSAQIPTFRNEYQKKTTGIMGKAVPVVGFREQVAPFSFENNTRSTVTLIGNSALSSSSSTRPGLNINNSAMLTQVLNGGGANDNLHGVSTVNQQAVNDQVNNEFFMGTNEAHNAESDDLDDFLAYLVNQDFINNGDSFIDRD

SEQ ID NO: 292 - protein, 463 aa, Zea mays
MHACKMMAGHNKRNIILMHKYEMGRLLGQGTFAKVYHARNTRTSVSVAIKVIDKGKVVKVGLVDQIKREISAMKLVRHPNVVQLNEVIATKTKIYFVLEYVKGGELLAKVKRGRLKEDVARKYFQQLICALDFCHSRGVYHRDLKLENLLLDENSDLKVSDFGLSALAECRRQDGLLHTTCGTPAYVAPEVINRKGYDGAKADIWSCGVILFVLLAGYLPFYDKNLIDLYKKIDSADFRCPTWFSTHVRRLLLRILDPTPGTRISIEKIMENPWFRQGLDHANLLLRYNLKTNDAPQVDTDKNEDFDPPSTNITTDSKQEDEKKPANMNAFDIISHLSSGLDLSGLFQESDKKTESKFTSTNTSSAIISKIEDIAKDLRLKLTKKDGGLLKMEASKPGRKGVMRIDAEIFEVSPNFHLVEIKKTNGDTLEYQKVMHQEMRPALKDIVWAWQGEQLKQQQEQQQ

SEQ ID NO: 293 - protein, 620 aa, Zea mays
MEPAENDTSSPPEYGAGKAAATVPARSYWRWRRDDFFPEPSFASWGAYRRALRETPARLRDRLAGRSTDAAELGALRRRSEHEMRRCLTWWDLTWFGFGSVIGAGIFVLTGQEARDHAGPAIVLSYVASGLSAMLSVFCYTEFAVEIPVAGGSFAYLRVELGDAAAFVAAANLILESVIGTAAVARSWTSYLASLVNRPASALRIHAPGLAGGYDELDPIAVLVIAVTATLAMLTAKGTSRVNWVASAVHVLVIAFVIVAGFAHADAANLRPFMPQGVPGVFRAAAIVYFAYGGFDNIATMAEETRNPSRDIPLGLLGSMTAITAIYCVMALVLSMMQPYTAIDRSAAYSVAFASVGMRWAQYVVALGALKGMTTVLLVGALGQARYTTHIARSHIIPPVFALVHPRTGTPVHATALIAVCSACIALFSSLDVLASLLSVSTLFIFMMMATALLVRRYYVRGVTSRTHALRLTALLLLIIASSIGIAACWGTSPERWQGYVVLVPAWAAGTLGIQLLVPAARAPKVWGVPLVPWLPSLSIATNLFLMGSLGKDAFIRFGVCTAVMLVYYVLVGLHATYDVAHGACGWEEEDDGDAAAADEDKKVVAAADVEKADAAGGTR

SEQ ID NO: 294 - protein, 615 aa, Zea mays
MGVVYYQYKSEKEICSMPVPHAFISVSELKQLIMTSGRHGRGRTRGRATEDIVISNAQTGEEYADERASIPQNTTVLVRRISIPGQLSEKIVLSPRPEVTEECSVPCKSVVTDSSSKSCSSTVVQDEDAVIAAVIDAAELKWEQLPSKRGQDSGRFTSRRNYGPLEGETPPPGYVCRSCGVPGHFIQHCSQENKMPPPGYICYRCRIPGHFIHHCPSIGDPKFDNNKMSRSLVPVVTPVDGILDSLVPSAPAGAVDDLPAELHCRLCKKVMRDAVLTSKCCFDSFCDRCIRDYIIKESKCICGVETLADDLIPNQTLRSTISNMLGTQTSSGGSGTTRHRSSSGSNPNPKIQSHTASVASAREVKQSIDHQLPAVSAPDYVLQVATEGDLVNQPLEKLAATAEILSKYEGNSAEVSVEKAVANAEALKVKDGSETTSNATTVSGSREHDVTRTDQAKKKRKKADLTKNVQPNNVGYGYNVSFDPAYYNPFINGHPWATEPYMYSSMGMPYAGYPMDPYCANPMDPYCEYPMDPYCVNPMQGYPASYQRPETEPMRRGSTAAARAPLKHRERSDRHRPKDTRLQPQSTEHKRRLVSSHGTRSNSDRRDHGHSYGAS

SEQ ID NO: 295 - protein, 879 aa, Zea mays
MVMGLGSKRRVAEGGTEPEEESSEEYEVEEVCDHIASSRGSRLALFGSDLRLGRFRPRRRRRRPLAGEGAAEGFLHDLVIHPDNRWYQLWTKFILGWAVYSSFFTPLEFGFFRGLPENLFFLDTVGQAAFLIDIVVKFFVAYRDPDTYRIVYSPTAIALRYCKSSFIFDLLGCFPWDAIYRACGSKEEVRYLLWIRLTRVTKVTEFFWRLEKDIRINYLFTRIVKLIVVELYCTHTAACIFYYLATTLPESMEGYTWIGSLQLGDYKFTHFREIDLAKRYITSLYFAIVTMATVGYGDIHAVNIREMIFIMIYVSFDMILGAYLIGNMTALIVKGSRTERFRDKMKEVIRYMNRNKLGKEIREQIKGHLRLQYESSYTEASVLQDIPISIRAKISQTLYKPYVESIPLFKGCSAEFIQQIVIRLQEEFFLPGEVILEQGSAVDQLYFVCHGALEGVGIGEDGQEETLLMLEPESSFGEISILCNIPQPYTVRVCELCRLLRLDKQSFTNILEIYFVDGRRILSNLSESEYGGRVKQLESDITFHIGKQEAELTLRVNSAAFYGDLHQLKSLIRAGADPKNTDYDGRSPLHLAASRGYEDVVQFLVNEGVDMDLTDQFGNTPLLEAVKQGQERVAALLFAKGAKLSLKNAGSHLCTAVAKGDSDFIRRTLAYGADPNCRDYDHRTPLHIAAAEGLYLIAKMLVEAGASVFTTDRWGTTPLDEARKCGGRVLGALLEEARANELAMFPERGEEVRDKMHPRRCSVFPYHPWRAATGEERRIEGVVLWIPHTIESLVALAQEKLGLPGPASRLRLLREDGARVLDVDMVNDGQKLYLVGGEDGDQKYVEENGIKSIVPAGHCTELQIRNYVRCEMEMQCEAN

SEQ ID NO: 296 - protein, 2572 aa, Zea mays
MATLVRHDSRQYSWWISHISPKNSKWLQENVSDMDSKVKAMIKLINEDADSFAKRAEMYYKKRPELMNLVEEFYRAYRALAERYDQSTGALRQAHRTISEAFPNQMPSMSDESPSAFSQEMEPHTPDTSTLTRVAFDYDDLQKDGVGVSPQSFTSKRNGTHPEETSALSSSVENAPRAGFDGKVWKGLTFEGPNVKGKDDISNEMANLQQEVARLLAESQDLKQQMFSESERANKAENEMQMLKATVLQLNAEKDTSLMQYNNSSERISTLESELSKAQSDLEKLTDEMAADVQKLINAETLNIAIQSEAEGLDQKMKMQQQALEQKLKELESFRSSFQEEHEKRMQAESALLSQRKELAQSHEEVQRLAIEIKTANEKLNEFKQTKEVLEYTVCELKKDVERLTEQNQSSEVLVQKLGDQINTLKDSNNELQSEIQSLKSIISQLNTEKNAAVLQHQQFVELVSVLESQLSKLQSELDETEQKVQMLTHDLEKKKEEADNVHLKLQDECHRRMQIEATLLMTEGLHSQLQEEMQMLTQDFDGSTKKLSELEKNKLDLESILKELNNTILGLNSEKDATLLQQQQSLQKVSDLELELSKMQLEMEVLEDTVCELKKDVERHTEQNQSSEVLIQKLGEEINTIKDSKNELQSEIQSLKSIISQLNTEKNAAVLQHQQSIELVSVLESQLSKLHSELDEIEQKVQLLTHDLEKKKEEADNVHIKLQDECHRRMQIEATLLMTEGLHSQLQEEMQMLTQDFDRSTKKLSELENNKLDLESILKELNKTILGLNSEKDAALLQQQQYLQKVSDLELELSKMQLEMEVLEDTVCDLKKDVERHTEQNQSSEVLIQKLGEEINTLKDSKNELQSEIQSLKSIISQLNTEKNAAVLQHQQSVELVSVLESQLSKLQSELDETEQRVQLLTQDLEKKKEEADNVHLKLQDECHRRMQIEAALLMTEGLHSQLQEKMQMLTQDFDGSTKKLSELENNKLDLESTLKELNNTILGLNSEKDAALLQQQQSLQKVSNLELELSMMQLEMDKSEQKILLLEQEIARKNGSVDSLEISLKDECEKRLQAQKMYSQSQEDVSRLYIEIEKQNGKLNELENLISELNNTILLINTEKDATLHENQQSSVRISDLESELMALKTELENVEGKVHAVEQELIYKKEEADNLQISLQDEIQKRVEGEESLLMMTNLHSGSQNEVRGLALELEKLNGNLRQVENSKVDLENIVTKHTEEIHILRERNLSTDLMIKDLHLELDALKDLNVKLQTEMGLHIGEKEALQREFTSQREEKKNLEGIHHTLVDEMSTLKTTATMNQKLIEELQITNSKLKEVCAKSEVEKALLSEKLQEVEKLSEECSLLENSLSDANAEMDALRDKIKALEALESSLKDIISCHVSEKAVLVSELEILGKRLSDASEKNSIMDSSLFDMKMDLEDLRTKLKDSEESCQALLANNSALSGEVDALREKIKALQDSESSLKDAISCYVSEKAVLASELEILGKSLSEVSEKNSILDISLCDMKTELDELRTKLKDSEESCQAHLTNNSALSAEKNNLFSQLESITLAMKALEGMHANLEQKHSSVSREKDFAYDQVRELQDQLRIKNEEFEVSAKSHQLQANSYEKQIFSLQEKNHYMEEVLQQEQQKNINASISTVILENCLVDEQDKKVALFTECQKYAVENHSANMLVSELMEEARYHGEERKKLLAHNEKLREGISNQMKFLNICKDLGPADLAEDEVLLQTVSDETINIMRLKDETEDVNRLMDTELSVLSVVLLQVGMELRDLHLQKCALEKEVESGEKETLSLQNQNQQMLEQNEQLRSGLQESSEGVEVLKTEVFVIQEKLSCLRESYQTSQDEISNLTKKNESLSKEYQSLSEKYNALEDENDTIFEECMMLKNLCLFFRGHNNEIASALASLTDEMALLSLAKGDLDLQVNELNRRSVMLESENYHLKDYIIYLVEILRTRLVLSEFDLDTNRSVFQELVVELENCMTQLVQKDDELMEAEEKVQLLQEKNRELCGVVGSLQVAMEGAKVVKGELEKKITILIEQCSSKDDKILLLHQDNEALQSEIEQCEREFVELMDDAITFSVNSAVYEEKAFELMMNGKATENRAISQKELLMKEISSRDANIEELQKRLAGIQDEHAELKAELNTHLALIASLVDHVSVLEEDVRSLSKPCSTEGKEETARVHHVQEGDDGLESHCLVNGTPKLQGLIARIEALQVVVLNAKDRQDRKSAESAAKLAAASAEIQELKTRGGSRMEAKEICSDNEKQDVEVSKGKQVQIMKDIELDQISTCPPYGAGAALYPHGTGANAELDDDMLQLWEAAERSCKNQTAKSSSSEHDIQAVEDLESECPSSELARGRDLGTNKLEVPKGAVEPHEAWSKNVLERLTSDAQRLLSIQASIEELKKKMEGSSKGTNSEYGSVSAQVHETEGLVLEQINSNNKLSRKAENYPALSDNTSTERGGYSSRRKISEQVQRGSENVARLELELQKIQYVLLKLEEEHEYTRLKVSDKRTRVLLRDYLYGRKDRGGGQKGKKKRVPFCGCVRSKSRTEP

SEQ ID NO: 297 - protein, 438 aa, Zea mays
MQADDKLATQISLPPSCIASEIAMDFSCFQPHTGICSYLPFDSYMQHDGQYELHLHPADHHPLEVTGDYTSATFDDLGHEFFAEREIEKPIFNRTSSIGRRVGSQLPLPTIKTEVSHLIDSGLVSCKAYEINDRFLARKKTSLKKANVVKGQWTPEEDRKLVKLVEQFGLRKWSYIAQLLPARVGKQCRERWHNHLRPNIKKDIWSDEEDMVLIEAHKEVGNKWAEIAKRLPGRTENSIKNHWNATKRRQFARRRSRTSSKAPKPGTLLQSYIEGLGIVGPSDKSAAPLSEPTLSPEAPGAKSAKTGGTTLPEEHSPPSNMLDSQGVLLPSEELLAPICDELLDGMCGGLFDCTNEDAFFRVCAVDDDIDVSYIFDHAIKVDPEIDMEMMMMWDDDALACTAGPAAGTAHVETVHVKEEMDLMEMVAATQNCGEAENH

SEQ ID NO: 298 - protein, 134 aa, Zea mays
MASQLSAAVPRFHGLRGYAAPRSAVAALPSVRVGRKRSSSQGIRCDYIGSATNLIMVTTTTLMLFAGRFGLAPSANRKATAGLKLEARDSGLQTGDPAGFTLADTLACGAVGHILGVGIVLGLKNTGALDQIIG

SEQ ID NO: 299 - protein, 328 aa, Zea mays
MDQAAEESCVPPGFRFHPTEEELVGYYLARKVASQRIDLDIIQEVDLYRIEPWDLQERCKPQHAGGGHDEQTQEWYFFSYKDRKYPSGTRTNRATAAGFWKATGRDKPVLSSSTRTTRCSRVIGMRKTLVFYKGRAPNGRKSDWIMHEYRLQSNEHAPAQASSFILPCEEGWVVCRAFQKPIPNQRPFFPTSYAGYYDHNLSTTARLHVDGDRHFLAGSSAAAAALLQQPPGLAGSSFPQLYSDDDLESKKQLLSIPPLESPTAMACCSDAGGYAQRSSYDEHEMMMMMIQQGGGGGEQAAAAIDWNFLDSLLSATSQLHGPSGSLLQ

SEQ ID NO: 300 - DNA, 2059 bp, Zea mays
aaaaccgccccctcccttcctcttctcctagctctcttgcctgcgcaccactcgagtcgagactcgagaggcacctgatctttccttcccgtcttcctcccacacgtccccatcaccattgctgcgacgagagtgagcgggagagggtaggtggcgaggcggcggagatggggcgggggccggtgcagctgcgccggatcgagaacaagatcaaccgccaggtgaccttctccaagcgccggaacgggctgctgaagaaggcccacgagatctccgtgctctgcgacgcagaggtcgcgctcatcgtcttctccactaaggggaagctctacgagtactctagccattccagcatggaaggcattcttgagcgttaccagcgttactcatttgaagaaagggcagtacttaacccaagtattgaagaccaggcaaattggggagatgaatatgtccggttaaaatccaaacttgatgcacttcagaagagtcaaaggcagctgttaggagaacaattgagttcactgaccataaaagaactccagcaactggagcaacaactggacagttctttgaagcatattaggtcaagaaagaatcagctcatgttcgattcaatttccgcgcttcagaaaaaggtcagttacactctagattcccttgtacctggcattctgcgtgtgttacatgagtcactagtgaaaattattgttacgagcacacctccagcatttggggaattagagcaaacgttaacttcagtcacatcatgacataattgtacacatatttcattgtgattagtgtattttcaatgtagtttaacattcgcaatctgctttcaccattcatcatgcaactgtcacagaaatatactctaaaccagagtcaagttttgtctctgttgtagaagtctcagatagggagcatcaatggaagacctgaatctgtgtgtcacccttagatatttttaggaaatgcaagttagttttcaggtgggagacgggacaactgatgaccatcatgccatcatgggtggaataggggggggggggcatgaaacgagttagtttgagttggacgtgaaattgatctccggtgaacgccctaaacttaggaaatggcttactgagtggcattttaccatgaaatagtgaaaaggataatgagacagaatgcactcaggtcgaagtgcttgagcagactagttgtggtaactatagctggtctggcaacagatcttcaaaaatcccagaatgttgattgctgataggatttgtggtgcatctttacaaccatatgtcttcatgtgtgcaggagaaagcacttacagatcaaaacggtgtcctgcaaaagttcatggaggcagagaaggagaaaaacaaggctttgatgaacgcgcagctccgggagcagcaaaatggagcatcaacaagctccccatcactttcaccaccaatagttccagattccatgccaactctaaatatagggccatgtcaacatagaggggcagcagaatctgagtctgaaccgtctcctgctcctgcacaagcaaacaggggcaacctgccaccatggatgctccgcactgtcaagtaacaggtgaggtcttcccagtgtagttttgcagctgatctcgacagcaacacacctgtcaccgaaatgcttcggtgaccctagatatcaaccgatgcacgatccatctcgatcctgtgatcgaataccggcgtaggtactaccaataaagtcaggccccgtcaaatgctttacatggtgattgaagtctggagcttctcagcaccaccatatattgtgttcagttcctgtgtttattgccatagctaccctttttttctctgatctacgagctagacgtagctttgtgcttggagattccactactatgtttcctctgtcctgtgtatgctttaacggagatgcacgttgtacccgtggtaatatatataaatttgcgttgtaaagatcaagtggctcttttctccgaaatgttatgaagtctcaggtgtcaaacatgcgtgactttttaactttgaac

SEQ ID NO: 301 - DNA, 1014 bp, Zea mays
atgggcaagaacggcctggtctccatcttctcccggctcgtggactccgccgcccccacctccacgtccgccgccgccacgccgtggcagtggtcggcctgcggaaccaacccgcagacgacctccttccgcgcaggcgcaggcggcgacgacgacgagccctgctgcacggcgacgccgcccacggcagcagcagcagcagccagtcgatccgtccaccggaagccggctgcgatgggccgcggcgcgccgcccggcgaaatgtacaagacggtcaactcggtcttcctggacgaccccgccgcggacgacttcttcttctccctcgccggcgacggcgacgacgaggaggaggtggcggggctctacctcgacgacaacgacgacgacgacgggttctcgaccaccacggcgtccgaggagtggtcggaggaggccgtgatccgcagcctgggccgcacgtccaccgaccgcttcttcttcgacccgcagcctggcccgctgccggcgtccaactccatcctcgccaccacggccgcggccgccgccgagacgccggcgaggaagaagacggtcccggtcccagtcccagtcccagggccgacagaggaggaagacgcaacggcaacgcacgcggacgagggcgacggcgtcaagaagcagcggcaaccgacgacggcggcggcggcggcggcagcggtgtcgtcgtctctggcggagcgcagcgtggcggtggcggtggactcgggcgacccgtacggcgacttccgggcgtccatggaggagatggtgtcggcgcacgggctccgcgactgggcgcagctggaggagctcctggcgtggtacctccggatcaacgggaagcagcaccaccacctgatcgtgggcgccttcgtggacctgctcctcggcctgtccacgtcctcgccctcctcctcctcctcccctccctccagcaccgccgccgagaccagcaccaccaccacgagcagcaccagcaccggctgcagctga

SEQ ID NO: 302 - DNA, 792 bp, Zea mays
atgtcgtcgtcgtcgtcgtccagggcgcggcggggcgggagcgggagcctgcagcagttcccggtggggcggtggcggcacgtggcggtggtggacgccgggtgcggctgccgcccgcgccgggccacaaccaggctgctgagccagctgccgtccttcctccgcccgtccccaaagccgccgcagccgccgccgccgccgcgcagcagctcgcgctcctcctcgggcttcttcccgtcctcggccgcctccaccgcctcctcctccgccaccaccttcaccaccacccactcctcccactccaactacgactcctcctacacccaccaccccaccaccaccaagcacctggcgtcggccgccgacaagccgccagcagcggcggcggggaggaggaggcagcagctgcagggccaccaccaccaccaccaccagggcagcaggaggaagaagcggtacgagaagatgggcggcccgggcgcgggcgcggcggcggacgcggacgcggacgccgccgcagcagagggcggcgttgggggcgtggccgtggagaaggagtcctccgacccgcgcgccgacttccgggagagcatgacgcagatggtcctggagatggggctgtgcggctgggacgacctgcgctgcatgctccgccgcctgctcgcgctcaacgcgccccgccaccacgccgccatcctcgccgccttcgccgaggtctgcgcgcagctcaccaccgcggccccgccgtaccacgccgccgcctacgactacgactaccactaccactactga

SEQ ID NO: 303 - DNA, 2536 bp, Zea mays
gcgtgtgcgcctcgtgcgtgcgtgtgcgccgatcaaattccctgcccggcccccagccgacgtggcatggcatccccagctggatcgcgcagaattccaagcaccaccgaatcagggcgagtgggagcagagggaatcccatgtctccgcccctcgctggagtagatcctcggggagccggcgtggagctgccgcggtagaaagccagctgagcctgcgagcgcctgatccagcccgatcgggatcgatgggtggggaggcgccggagccgcggcggctgacccgcgctctgagcatcggtggcggtggcggcggctgggttcccgatgagatgctgcaactggtgttggggtttgttgaggacccgcgcgaccgggaggccttgtcgctggtgtgtcgccggtggcaccgcatcgacgcgctctcgcggaagcacgtgacggtgcccttctgctacgccgtgtccccggcacgcctgctcgcgcggttcccgcggctcgagtcgctcgcggtgaaggggaagccccgcgcggccatgtacgggctcatacccgacgactggggcgcctacgcccgcccatgggtcaccgagctcgccgcgccattcgagtgcctcaaggcgctccacctgcgacgcatggtcgtcacagacgacgacctcgccgagctcatccgtgccagggggcacatgctgcaggagctgaagctcgacaagtgcaccggcttctccacggatggactccgcctcgtcgcccgctcatgcagctcactgagaactttgtttttggaagaatgtcaaattaatgataaaggcagtgaatggatccgcgatcttgcagtcaactgtcctgttctggcaacattgaatttccacatgactgagcttgaagtgatgccagttgacctagagcttcttgcaaagagctgcaagtcactgatttccttgaagattggcgattgtgatctttcagatttgatagggttcttccaatctgccacatcactggaagaatttgctggagggacatttaatgggcaaggggaactcaccaagtatggggatgttaaatttccatcaagaatatgctccttgggacttactttcatgggtgcaaatgaaatgcctattatatttcctttttctgcgatactaaagaagctggatttgcagtacactttcctcaccaccgaagaccattgccagctcattgcaaaatgcccgaacttactagttctcgcggtgaggaatgtgattggggatagaggattaggagttgttgcagatacgtgcaagaagctccaaaggctcagaattgagcgaggagacgatgaaggaggtgtgcaagaagagcagggaggggtctctcaagtgggcttgacagctatagcggtaggctgtcgtgaactggaatacatagctgcctatgtgtctgatataaccaatggggccttggaatctatcgggacattctgcaaaaaactctatgacttccggcttgttctgctcgatagagaagagaggataacagatttgccactggacaatggtgtccgggctttgttgaggggctgcaccatgcttcggaggtttgctctgtacttgagaccaggagggctctcagatgcaggtctcggctacattggacagtgcagtggaaacattcaatacatgcttctcggtaacgttggggaaaccgatgatggattgatcagtttcgctctgggatgtgtaaacctgcgaaagcttgagctcaggagctgttgcttcagcgagcgagctctggccctcgcaatactaagtatgccttccctgaggtacgtatgggttcagggctacaaagcgtctcaaacaggccgagacctgatgctcatggcgaggcccttctggaacatagagtttacacctcccagttcccagaatgctggtcggttgatagaagatggggaaccttgcgtagatagtcatgctcagatactggcatacggctctcttgctggtaagaggttggactgcccacaatccgtggtcactttgtatcctgcgtgagtgtaaatagactgagggcccgtttggtgcccatggaaccgttgtctggaacaatttctggtaggattgcttgctgatttgtataggctttgatcagctggaaacaaatgaacaaggcctaagctcgtgtctttctctcacgtccttgctttcttagcctcatggtcaacaagaatggtgttgataacacgatatgtgcttattgtattgatctagatggctagctgctacgtactgcaatcagctactagtagttgagatgacctggattctggaataagcccttgctatcttcgcctgtactgctatctaatcctaggaagcatgtatatgtatactggtaaaagtaacgatggaagatgtgagtctgattgcccgccctgatttgtctcatgggaggtataagactatctccagcaacttacccatctctgtacttatattcaaactttattgagcgaacagtgcagtctatagtgcaggagtcgg

SEQ ID NO: 304 - DNA, 5368 bp, Zea mays
agagacttcacgcaggcagtcttcaccgcgcggcggcctcatacccgcaggcagttttcaccgcgcggtggcctcatccccgccggcgagcctccactctcctccgccggtaagcctccaccgccccatcgatcgctcctcacccgccggtggcctccccctcggcggacatttcttggtgcatttggccccccccccctccaccaccagcgaaatttacccatcccgaatcgccccccaaaatcggtcctacaccgcaccagatcacatctcatgattccagtgagaattcgaaaaggaggaagcaatgacggaggtggcgctcctccggggcccgaccaacctcgcttccaccaagcggcagccccgagcgcactgcgggatctgctaggagccggcgactccttgaacagcatgggcaagaggccgtggaggaggaagaggagcggtggtcgttcttggcactgctcttcgagctgttgcagaagtcgctgctcgggtgcaggacggtgggcggcggcggtgaaggcgaacacggcggcggcgggatggagattgggctgcccacggacgtgcaacatgtcgcgcacgtcacgtttgacaggttccatggattcctggggctgcccgttgaattcaagcccgaagtgcccctccgtgctcccagcgtgaggtatgactcttagtgtccatcgtcaatttagattaattttaagttcacgcttccagaaatctgactttatttttgcagaatttacttatgcaataacatgaacttttttagctccaatttgaactttaacttgagggtgtttgcagttttcttcttttaattccaagtatgtctggtgctttggtaattgatatgaacagttgataacaataagtattagattatgttcttttagaaagctgtaaaatctagatgatgtttgcttgacacaggttcgttaatagttcatcactctttagcattttgatggcatgctcgtttccgcaatatagttttgatccttgaaaagtagtcccttttgtttgtgttacagcctccatgctcccttgatctgaaatatcattgaaaaagcaaaattttaagtggaatttgagtttcgtttgaattgtgttatgaagtatgaagttggttttcgtgttggcggccttagcaggatctgaactacggttgatgaaatgggcatgtcttctgatagtggatatgctttggaccgcaactgttcatagaaataatttctgtgttttttcccatgttccatcaaacaattggtcaatcatttcgctgatgcaatcttgtagcatccatgattttactgtacttgcttacctcatctaagaattattccgattgtactaggtacataaagttgattgttacatcatctgtcattagtaagattggaaagttgccagggattccatgatttatgtatggcctattttgtattgattagattattcactatttttctctagacttgcaaattactttggtttttacctttttttctatccttcatctattgttcgtacagtagaccttggcttcaaatacttggtatattattttttgtcccatataacagagctagaaatattgccagcagccgagcacatatgactccatatattgtaggaatatttctttatcagaatatgatccaagaccacctgaaggaacaatttccaattctgaacatgaaagatgagtgtaatgctaatgcatgaatctgaaagtgcaggattttcgaaccagtgcaggatggggcacaggttggctcctgtcaagtgccaataacttccgtactaaattctaaatgctggtgaatagaagttcaccaagaagacaatgaaaaaaaactagaccaacaaggaggaactaggcagcttttatatcaagaaaataggcacccaatttgcctggacaagtacttgaatgtgggtggtataggaacaccacaaagcacaaacaactgagcctgttcagctgccttagccaggaacccactgagagaacaataccaatattgggccaaaaaaatgttgtcaaatcatgtctggcaatttggaagttgcgaagttagttaaaaaaactgtgtgaaagatatgtttatggacatgaatgaactcagttacaagaaaattcatcaataaatttgcaaaattgtaataactgacctaatgatcagctactacttctaaaagtttactactattgtttaccagcaagacaaaggtgataaaacttgatggggtactaattaaaccgtttgaggagaaatatcagaaggatgcttatacataccaagcgagacatgtaagaagcaagctctccatccttttgacgaagtgctgactcaaaagcacttggagtcatggtcctcagataatatgacattacttcctgaagacattcgcctctctaatgaagcattgtcagataaatccaatgaagcctgaaggaaatggctttcttctagactatttatactgccagaactaggcagctttctgagaggggcatttacttcaaagagaaaaataggaaacaatttaaaaagaatggtacttcatcaatgcaagaggtgtcatactatctgacttattatagggacaggacgcaaactataagaaaagtgcataggtgtcatgtatcatgtttcttattgggagttccaagttgtcggtttttagcattaggctaaaaagaataaacaaaagggttctatattagttctgctttataattgttttgtaggtgtttattccgataaacatccgaggaacgcactggtatcttaccgtcatcaatgcaagaaatatggagatacaagtgctcgattgacttggtacttcatccggccataatgacctcactgactccgtgagtttgcacaaaccaaacaattagtaatctctactactaattatgttagtagtgttggcgtccaaccacttgcatggcgcacgttctgccaagcccgcatgccgcagctgccccaaccgcgcatcccgcaccctccctgcatacgccgcgcgatccacccgcttcctcctccccgcgcccgcagcacccgccgccgatggcagccgccacgcccgcgcaagggaagttgcttcccaaatccgcgcacgggtacaagatttcctctgtccaaccactcgcatggcacaagtgctcagatttggatcccgcggacaagatttcccaaatcccgcagacaagttcatccgagcgcatctcgcagccccatgcgcgcatcccgcagccgcgccgcagccgctccttccatccgcgaggatcccccagccgctctttccgtcctcgcgaggatcccccagccgttccttttatcctcgcggatccgagcgcgctcgatcggatacccttaatcgcggctaccataaacgcgctcctgccccacgaaatcgatggcgcgcgtgttgagggcgtggggaggaggtgcgcggccgccatcaacgatgtcctacccatctgctccgtgattctcgccattcttcctggttgccaatcagtttttggttcccccgctgaagctcagatctatctgaatggcttccctatgaagcatcatctggttgctcattggcatcacctttgttctgttgaaactggacatcttctatgttggttgttaacgttaagaacttttcttgttaggaactgttatcttgttggttgctctcccatgcagtggtgttgtaggaattttattcttctgcagtaacaggtacagaaccattggtgctttcagatttgtcgagtaccacaaggcatggaatcgttggagttttcagatttgcctaccacggtttcagaagttgcattttcggtgtttgctcccactacaatgctctcatcattgtgggtgctctctgatattatagtattgtccgaattatcttctactgtagcaggaatgggatcactggaatttttggatttgtcaagatcaggctcagcttctttctgctgcaggagttcctttatagttgtcgtctgatctgggtttgaagcaattgcgttctctttcatttggttgatatggctctctttctccacaagagctgcttccaattctttctgcgtgttggtaagatatgtcgtggtagtttctgaatccatgagcttgtttttcaattctgccctctcaatacttaggacagatgtttttcaattctgtcctctcaattctgcttccaattatatttgtttgttacaaaatactttaaattgtcatttcatttaaactatttattgtaaactagaaagtatacatacatatagacagatttgtacacgtaatcatgtacaaaattcgccacacctcaaattttgtgcgtcctccgccactgctcgcccccacacctcgccctccatccacctccccaaatgacgtgccttcctggaattaaaaaggcagaagggaggccacacacgagaccaccaatcggacacacgcgagtacatccgacgcccaccatcagccagatagtgtacagagccgttgcgatgtccgtgcctctgcccccgcctcctccgccctcgcgacgcaacatcactgcaaacactctagcagtgctagaagccatggctgcacacaatgtgaggactctcatctactccagcacatgtgcgacctatggagagcctgacaagatgccctcgctgaaggaactccccaggtcaattatttccgttgggataagaaggaagaacaatcctctgatttgtacagattctgccgcctcatgaccaaattccgcaaggaatgtgaatcccttggccttgaggacttcccgacttcagaacggttgcgatagcacgatcatcagcccgggaagcctgactggtcagaggcaagccgattcgttgccttcaccatgaaggacgaaaccaaaggcgagatctacgtggccttcaacaccagtcacctgccggtggtcgtcgggcttctagagcgctctgggttccgatgggagccggtggtggacaccggcaaggaggcaccatatgacttcctcaccgatggcctgccagatcgtgctgtcaccgtctaccagttctctcatttcctcaactccaatctctatcctatgctcagctactcctccatcatccttgtattgcgccctgatgtctgaaagaaacggatacaatagagtatattgtagccgtagtatatattttctttgacttttctttgacttccttttgtagatctgccaaacacaaacacaactaagcaatgtagcacatactattggcacgaccctccactcatttacattctaaattttatatttttttatagttcctgaatttgatcgctcc

SEQ ID NO: 305 - DNA, 1862 bp, Zea mays
gtgaaatgaactagaccaatttccttgcagagagtactgttttggcgatggacgttgccttaagcaccattgtgtttgtcatcgccattttcatcccggcactgctgacgctggtgcaaagaagccgtagccggcacgccggccataacccaccacctccgccggagcccagagccattcccctggtcggccacctccaccacctcctgagaaagaagccactccaccgctgcctcgcccacctcgctgagcgccatggagacgtcctggggctccggttcggttccagccgagtcgcagttgtgtcctctgcctcagtcgcccagcagtgccttgtcgcactggacacctcgttcggcaaccgtccacggctgccgtccgcgaggatcctctcctatgagtggtcgaccatgggccattccaactgcgggccgtactggcgccaagctcggcgcaccaccagcacggagttctcctccgtggaacgagtgcagcacttcgctgatgtccacgagcaggaggcgcgggccatggcacgccgcctttgtcgtgtggcacatgcttctgggggacgcgctcttgtagacgtcaagtcgcgactgttggagatgctaatgaacggcttactggacatgctcttcaggaggacaacctctcggagtcggagtagtgacgaaaaggacgaggccgtggaagtgagcgaggaggcccgatgcttcatggccatggcggaggagacgatggagctcacgctgacggtgtgggacttcctgccgccactggcgcggtggctggacgtcgacgcggtgggccgccggttacagcgactgcaagcaaacaggacggagtttttgcagaggttgatcgaggaacacaaggagatggagaagagcggtcaagtcacacgcaggacgttggtcggggtgatgctggagctgcaggacaaggatcccgaagcctacacggatcagctcatccgctccttgtgtgttagtgcactcgaagctgggacactcagtacaggctatacaatcgagtgggtgatgtctctcttgctaaacaaccctcacatcatgaagaaagctcgcgacgaaattgacgcatgcgtcggggaacccaaacgcctactggacgcgactgatctcccaaagctgccgtaccttcgatgcattatcctggagacgcttcggctgtaccctgtggtaccccttctagttcctcgtgaatcatctaccaactgcacggtcaacgggtttaatatcgccaaaggaacgatgcttcttgtgaatacgtttgctatccatagggatcctaggacatgggatgacccagaaaccttcctcccggaaaggtttgaggatggcagtaaccaatcagggaagacgacgatggatctgtcgtttggcatggggagacgacgctgcccagcagagaacctggggatgcagctggcaggcattgctttggggactatgatacagtgcttcaactgggaacgagtgggcacggagcttgtggacatggctgagggctctggcctaaccatggcaaagaaggttcctttggaggccttctgtcaacctcgtgcttctatggtcgatctccttgcaaacatctagagctgctatatatatatatatatacaagttgtactaccaagacaatgcaagcacacgtcattatgaattctcgttgttattacagaataagtcaaaagcgctgctgcttttatataaaatcaccctagctatgtatgtatgttcatgtagaaacctactatcaaataatgtgtcgtgtacagcctcatatagcatgaaatgaaagtatattgtgaggcagagaatatgattctatcgtaaata

SEQ ID NO: 306 - DNA, 1920 bp, Zea mays
atggataagaactacggtgaactctacaacatcctcggatggggtgaggagtacttcgcggtgaacacggaggggcacctcagcgtgaagcctttcggccgctggacggagcccgggcaggagatcgacgtgcactcggtcatcgtggaagctctagcgacccaacccaacgacagcaccagcaaatctcagttccccatgatccttcgcttccccgacgtgctcaagaaccgtatcgagacgctccataacgcattcaacagcgccatggagtccaccgggtacacgtccaggtaccaaggcgtgttcccgatcaaggtgaaccagaacaagcacgtcgtgcaggacatggttaggttcggccagcaatggaactatgggctcgaggctggctccaagccagaactgctcatcgccatgagctgcctccccgtcaccgaagccgagcccaagccgtacttgatctgcaacggctacaaggacgcggactacatcgcgctcgcgctctcggcgcgggccatgggcctgaaccccatcatcgtgctcgagatggaggaggagcttgccatcgtcctcgaccagtacaggaagctgcagcagaagctgccagacgacgatgccgtgcgcaagaagttcgagccgatcatcggcatccgcgccaagcttctcaccaagctaccaggccacttcggttcgacggccggcaagcacggcaagttcgggatgctcgccgaccagatctacgaggtggccgagacgctcggcaaggagggcaagttgcactggctccagctgctgcacttccacatcggctccatgatcccgacgacggggaaagtgtacgacgcggtgagcgaggccgctggcatctactgcaacctggtgaacgagcacggcgccaagtggttggccacgctggactgcggcggcgggctcggggtcgactacgacgggacccgttcaggcgactccgacatgtcggtggcgtacgggatacaggagtacgcctccgccgtcgtgcaggcggtgcggctcaagtgcgactacaacggcgtcgcgcacccggtcgtgtgcaccgagagcgggcgcgccatggcgtcgcaccactccatgatcatcctcgagacgctctcggcgatcccggagccgcaggacgaggacacctccgagcagctgttgaacaggatccaggacctatcttacaagcagccgagagctccggttggcggcgccacggcggccgtttactctcacgccgcagacctcaagaagcacggcatcgagatgtacaagcttggcaagaagctcggcaagagggtcgtcgccgatgccaacaccgtctataactaccacatgaacctctccgtcttctcgctgttgcctgacttctggggcatagggcagctcttcccgatgatgccggtgagccgcctcaacgaggagccgactctcaagggcacgctggtggacatcacctgcgacagtgacgggaagatcgagaacttcatcagccgcgaaaacacattgccgctgcacctgttcgagccgagcctcggtggctactacgtggccgtactcgtctccggggcgtaccaggaggccattgctggcaagcacaacctgttcagtggcccaaccctcgttcgtgtcaatagtagcactacaaaagatggcggcttcgagattgaacgcgttgacctgggcccagctgcggatgagatcatcggcagcatgaggtacagcgtcgaggaagacattatcaccgtcatcgagaagaaagccaaggggacagaagaagaagaacgtgtgtgggcgtgggagatggtggagccactcatgaccaaagcgctcaccaccatgccctacctcaacgaatacaaggtccctgaacctgaacctgaacctgaacccatcccttga

SEQ ID NO: 307 - DNA, 1146 bp, Zea mays
gcaagaccaacaaacccacttctgactgaccactgtgccgcgccgtggtcaccggacggacacacagaacgacgatggccgcgtcggcgctgcaccagaccaccagcttcctcgggcaggccctggtctcccgcgccgccggcgtcgatgccggcggccgcatcaccatgcgccgcaccgtcaagagcgttccccagagcatatggtacggccctgatcgccccaagtatcttggcccgttctccgagcagacgccgtcgtacctgaccggcgagttccccggcgactacgggtgggacaccgcgggcctctcggccgacccggagacattcgcgcgcaaccgggagctggaggtgatccactcccggtgggcgatgctgggcgcgctgggctgcgtgttcccggagatcctggccaagaacggcgtcaagttcggcgaggcggtgtggttcaaggccggcgcgcagatcttctcggagggcgggctggactacctggggaaccccaacctggtgcacgcacagagcatcctggccatctgggcgtgccaggtggtgctcatgggcttcgtcgagggctaccgcgtcggcggcggcccgctcggggaagggctcgacaaggtgtaccccggcggcgccttcgacccgctgggcctcgccgacgacccggacaccgccgccgagctcaaggtgaaggagctcaagaacggccgccttgccatgttctccatgttcggcttcttcgtgcaggccatcgtcaccggcaagggccccatcgagaacctcttcgaccacgtcgccgaccccgtcgccaacaacgcctgggcatacgccacgaacttcgtccccggcaactaactgactgagcaacgccgtacatgtgtactaccatcagatccatccattcgttcgtccgtccgtcgagtgaacagtgtggtcttctctgtactctacttgttcagatcgtaggcgtgtagtagttgcaccagccggcgtatgctcatgatcgatgtgtgctcatcaatcaatgtcaatggctgcctgctgtaagcggtcgatgtaaactaagcacagacgcatgtatcgtcatcagtggatgaatcaatctatcgatggcctgtgccattcatttttgaatcgatcaaca

SEQ ID NO: 308 - DNA, 3804 bp, Zea mays
gtccctcttcgatctattattgtgtccctcttcgatctattattattcgctccttgtattcgcagtctcgcagagactccctactcgagctcgatcgccccctttcctaccgagtaccgaccatccatccgtccgtcgctgcggcaaccacaagtatagaagtagcggcagatcgccgcgcgcgtataaataggggccattctaaaagcaggcaagcgcaaaagccgcggcgtccatccaccccgacccatccaatccgttccattcctacgtcggctcggacctcggagacacagggatcgtcttcgtccccggcctctcgccttcctccacccccctctcctctctctcgctggctcgtggccaacccacccacccacctccgctccgccccgcttccatcgatccattccgcgatcggccttacacgtctaacagtacatgagtttctaactggtgcgagcccaagtaaagttctgtaattagtcacattcctgcacaatgtcgactgcgaaagtggtgcttgagcctgcatttcaaggagctggccataaaccagggacagagatatggaggatcgaggatttcaagccagtcgctttgccaaaatcagactatggcaaattctactgtggagattcttatatagttctgcagacgacatgtaaaggaggtgcttttatttttgacatccatttctggatcggaaaagattccagccaggtagtaggttttctgtgcctgctcctcagatctcctacgacgctacaaacgacattccgtgcccacctgtcgaaaactgttcttgtcacgcaggatgaagctggaactgcggcgatcaagacagttgagcttgacagcatgctcgggggccgtgcggtgcagcacagggagccacagtgctacgagtctgataaattcctctcgtattttaaaccgtgcatcatacccatggagggcggctttgcttctgggttcaaaaagccagaagtggacaagtttgaaacacgtctatatatctgcaaagggaagagagctatcagagttaaagaggttccattttctcgttcatcgttgaaccatgatgatgtctttatcttggatactgagaacaaaatatatcaattcaacggtgcaaactccaacatccaagaaagagccaaagccttggaagtgatccagcatttaaaggaggaataccatgacggagtgtgcgctgttgcaatcgtcgatgatgggaaactgcaagcagaatcagattcaggagaattctgggtcctttttggaggttttgcgccaatagggaaaaaagcaataagtgatgatgatgttgttcttgaaactacatcaccaaagcttttcagtatcagtaacggccaactgaagttagaagacgctgtccttacaaaatcaattttggagaacaccaagtgctttttacttgactgcggggctgagctattcgtgtgggttggtcgggtaacacaggtagaggacaggaaagctgccagtgcagcagttgagaaatacattattaaagaaaatagaccaaagacaacaagaataactcaagtgatccaaggttacgagaatcatacgttcaagtctaagtttgagtcatggcctgtaagtaacacgtcagggagtgccagcacggaggaaggccgagggaaagttacagcactcttgaagcagaaaggtgttgatgtcaaaggaatctcaaaaactagtgtgccagtaaatgacgaagttcctcctttgctggatggcggtggaaagcttgaggtttggtgtattgatggcagtgccaagactgctcttccaaaggaagaacttggaaaattctacagcggagactgctatgttgttctctacacttatcattctgctgaaaaaaaagaagagttctatctagcttattggattgggaaaaatagtgtacaggaagatcaagaggcggcttttcaaatagctaatacaacttttaattctttgaaaggaagacctgtccagggtcgtatttatcaaggaaaagagccaccacaatttgtggctattttccagccaatggttattcttaagggtggtactagctctggttataagaaatttgtagaagagaagggtctgaaagatgaaacgtattgttctgatggcactgctctcattcaaatttctggaacagcggttcataacaataaaacgcttcaagttgatgcggtcgcaacatccttgagttccacagattgttttgttttgcaagctaaaaactcgatgtttatatggaatgggaatgcaagttcttttgaacaacaacagtgggctgctaaagttgctgaatttctgaagaccggtgttgctgtcaagcattgcaaggagggcactgagagctctattttctggtcttctattggtggaaagcagagttatacaaatagaaatgctgcacctgatgttgttattagagagcctcatttgtataccttctctctgaggaatgggaagctggaggttactgaaattttcaatttttcacaagatgatctgttgaccgaagacatgatgatacttgatacacactgtgaggtttttgtttggatgggtcagtgtgtggagacaaaagaaaaacagaaagcatttgacattggccagaaatacgtacaacatgccgtggcctttgaaggtatttctcctgatgtgcctctctataaagtcaatgaagggaatgaaccttgcttcttcaggacatacttctcctgggatagcgcacgatccgtgggtggcaataagggctcaggtgatggtgggccaactcaaagggcatcagccttggccgctctttcatctgcattgaatccatcgtcgcaaggaaaacagtcagatgagaagcccacaagctcagatgacagcgagcatactcaacgagcttcagcaatggctgccttgtcctctgcccttaatccatcgacaaaacctagcagcacacagacacaatctcattcaggtcaagggtctcaaagagccgctgctgttgcagcactgtccaatgttttgactgcagagggatctcatagcccccgccacagtaggtcgtccccaacagcagatgcagacaagactgaattagttcctacttctccccatcaattagaaacagggactgcagaagatgtccgaacagagcctgatgtctcacaggaacaaacagctaaagaaaatggaggccagacaacctttagctatgaacgattgatatcaaagtccactgaccctgttagtgggataaacaacaagcgcagagagacatatttggtggacagtgaattcgagaccgtatttggcatgactaaggaggagttctacgagcagccaaggtggaagcaagagttgcagaaaaagaaagccgatcttttctgagacaaggctggcttcgaactaataaaagcccttacgtcgcacaggattgtccagcattctcatcatgctcgttccgcgtatgatgatcgatcaccagcagctttatccgtgagttgtataggctactcttttatctgcacatggtttgggagcattatatatatatcccccttgcccgtccattattctgaggtcgttcttgatgttgacctttcacgtgttttctttttttattgtattataaaaaatcaaactggtgtaaatggcattactagtgagatttttgtaagtaatggtgcatgggcaccaaggtgtatgcaacatatttttgttgtaagacttcagcttctattgttctggtggtgttctattgaccactggtctaat

SEQ ID NO: 309 - DNA, 1119 bp, Zea mays
ccttatcttactcgtttaaatacctgggtttcttctcggggggagagagctagagaaagcgtagagctagtcagagagagagagagagagagagagagagagagagagagagagaggcggggggcgggaggatggctttgctgcagagccagagcctgccaggcattggctgctgcagcagcagcatcgtcttggcacgagcgagggtgcagcagtgtctggcagcggcgtcgcactcacaggcgcccctcctgcaggccaatggcggcagggcgggcctcccctcctcctcctcgatccttaaggctggcaatgcgatcagcttcagccggcggagaaggagagacctgcgcgtcgtcgcggaggcggccacggcggggacggccaaggtcacgccggcctcgtctggcggcgtcagcctcagcgacgtgctctggccttctgccggagcattcctggccatggcggtactggggaaaatggaccagatggtggcgttcaagggagtatccttgacgattgcgccccttggagcagtctgctgcgtgcttttcagcgctccagactcgcctgcggccaagaaatacaatatgttcgtcgcgcagattgcttgcgcggcctttggcgtattagccctctcgttgtttgggcctggctggttagcgagaggcgccgctctttcagcctgcatagcattcatgaccatcacgggtacctcgcatcctccagctgcgagcttgcccctcttgtttatcgatggccccaagtttcacagtttgcagctttggtacgcgcttttccctggagctgcaggctgcatcgtcctttgcttgattgtaacaagaggtggtggtttacctgaagaagaacttcaagttttgactcaagcagcttgacgctatggatttttgtggaagtggtccgattaattattcaatcatgtaacataaattacattgcctgcatttgcgataaagttgtgaaaatgaaggtttactgtctcctgtcttggttaaagaagaaagaagactttccttgataccttgtgctcatcaaaatgcagttgatacaaatgtgtacataccattctcccatcgaataaagtctgacaatttattc

SEQ ID NO: 310 - DNA, 870 bp, Zea mays
atggccgcgccgctcacggccgtccgggcccgcctcctcctcctcccagtgacctgcacggcagccggtaccaccggccggccggcccctccgtccaagagcagcaggccgcgtctactaccaccaggcaccacccggtgccggtgctccaggcctcccatggaggcggtggcgccggtgtccgcggcggcggtggcggcgctgctgctgctgccggcggacgcggcgctggcggtgggcggcgagttggggatcctcgagggccgcagcttcgcgctgctgcacccgctcatcatgggcgggctcttcgcgtacacgctctgggcggggtacctcggctggcagtggcgccgggtgcgcaccgtccaggacgagatcaacgcgctcaagaagcagctcaagcccgccgccgcggccactcccgcggcggtcggcgccggcgcggactcctcctccaccacaaccccgccgcccgctgcggccagcaagtcgccgtcgccggcggaggcccggatcgaggagctcaccgacgagcggaaggcgctgctcaaggggtcgttccgggaccgccacttcaacgcgggctccctcctcctcggcctcggcgtgctcgagtccgtcggcggcgcgctcaacacctggttccgcaccggcaagctgttcccgggcccgcacctcttcgcgggcgccgccatcaccgtgctgtgggccgccgcggccgcgctcgtcccggcgatgcagaagggggacgagacggcccgcagcctgcacatcgcgctcaacgccgtcaacgtcctgctcttcgtctggcagatccccaccgggctcgagatcgtcggcaaggtcttcgagttcaccacctggccatga

SEQ ID NO: 311 - DNA, 8394 bp, Zea mays
aactaatctaggaaaacttggaagcggacaggatcatcgccaaatcgaaggagattgaacgaagcagcccagccaaattcccctcgccgccccgtcccttctcgacatttcttgtcccgtcgtcgcctcaatctcgaagcctctccggcggagccgcctcatcatcgttccgaaggcctccaaccaaacatcctctagggtttccgcatcgtccgtcgcgatgggcttcacgaagcggtcgccccagcatcccgcctccccagccggcggcgaggtcggcgcccagacggcagggaaggtcacaccagtgccggcggcgccggagtcggcgcccgcggcggtggtgccgaggcctccggacgtggcgcccttcctgaccaaggtctacgacatggtctccgacccggccaccgacgcggtcatctcctggagcgccgccggcggcagtttcgtgatctgggactcgcacgctttcgagcgcgacctgctgccgcggcacttcaagcacaatcacttcaccagcttcatacgccagctcaacacctacggatttcataaagttgatccagatagatgggaatgggccaatgaaggctttgttaagggccaaaaacatcttttgaagaccatcaagagaaagaagaaatcctctcaggatgtacctagtgatctgcagtcggtgcctgtcaaaactgcacctggcactgagaatatcgagataggaaaatatggaggccttgaaaaggaggttgagacacttaagagggacaaggcccttctaatgcagcagcttgtagatctacggcagtaccagcaatcatctagcgctgaagtgcagaatttaattcaacgcctccgtgtgatggagcagaaccagcagcagatgatggcacttttggcaattgttgtccagaatccagacttcctgaaccagctcgtgcagcagcagcgcaggagtaactggtggaatgatgatggtaacaggaaaagaaggttccaagctctggaacatggtcctgtagatgaccaagagacttctggtggaggcgcacaaattattcaatatcgtcctcctgttcctgaaacttccaatcagccaataccagcaaatgaagctttctattcaacccctgcacaaccagcttcaagccctgcacttgagatgcccatggatgtagagatggcttcaaacaatgttaatacctttgattcaactggcaatgattttactgacacctctgctctatgtgaatgggatgacatggatatatttggtgatgaacttgagcacattcttcaacagccagagcaggactttcaagtggaccctcctttaacagttgaggattatggttatgatcatccacggttagagcaggactgtcagatggaagcacaacagaattgcaaaaatcctcaatatgttgcctgtgtcttgaagcaaagggaaagccatgcatctgatgtccattagtactgatcagtttgagctgatgtcataactgaagcatgagcggtggtcccccagaatgttgtccagtaacattagtggatagagatttgtgatgaacagaatcttgagactggcaggttagccaccattgggaacctgaagaccgtcgggattgctcagaattcagtatactaatactaatactaaaaaaaaaatatacagtaacacatgttgactatacatgatttcgttttccttactcgctcgaccaaaggcagccgtacaatgtttttacttttgtccaggtgggagcatctaggtctttaaatggtttcggtgattaatggtgatcctagattattatgatttgcagagactataacttaggttatgataacagtgattgattatgcgtacatggattttgtctcttaaggttggtttggttatcagggatctatagggactagggagaaatcactttgctattcaaaattaaacatcctccatttgatcctcgtgattctttatcatcaaatcaatcctaagacttcttcggatacagtacagggacgctagcggtggggtggggtgggcatggcttttcccctatcgctcccgagtgtatggagcactgaagtgaagccctgctaaaatttaaaatgtttataatctctatctctactactcttatgtccttagtgtaggcgtgtacatctcctctgttctgccgtgcccgcaattacccgcgctcgtgactcctcgccgccgcagtcctcgccgccgtcctcgcgcccgcagtccccgccaaagctgcaacgcccgcagtccccgccgccgtgctcgtccccgctgtccccgaattcgccgcgccctcgcaaagctgctgtgcccgcagtccccgccgccgtgctcgtccccgctgtccccgaattcgccgcgcccccgcaaagctgttgtgcccgcagtccccgccgccgtgctcgtccccgctgtccccgaattcgccgcgcccgcgcaaagctgctgtgcccgcagtccccgccgccgtgctcgtccccgctgtccccgaattcgccgcgcccccgcaaagctgctgtgcccgcagtccccgccgcgccagcaacgcccgcccccaacagatcctggtgcgtcgcgaaccttctgccctccacctccgctccatggtgcgatgcaatctccgcacttggaaacgagcaatctccgcactcggcgccccccagtatctcacatggaaacccaaatccccacctcaatcagcattcatcgtcaagtcccattccatcgtcgctgtcaactcctattaaaacacacgaccactgcgagggatgtagacaaatctcccatcaaacttcgacgatcgttgtctgttcagcacgctcgttgtctgttcatcacgctcgttgtctgtgcagtgggcttcaacgccttcgccggtgagttcagttctctgccagattctgtgtttcaacatgcctcaatgtttaatatgttcatgggtatggcaatgttatcaatgttgcgtcaatggtacctgtgttgcgtgaatttctgcgttgcggctgtgttgcgtgaatttctgcgttgcgggtaccaatttttcaagttatttcatgcctgaactttggtgcgtgtactcttctgatgccattggtgtgtgtaaactttggtgcgtgtaaacttgaacagaaatactttggtgcgtgtactattctgatgccatgaatgtgtttcaacatgactgaatgtgttccatgggtttacatctgtcaaatgagaatatgatactgtttcatgggtttacatgtgtctctagatgtgctgcaactgttcatccaagtgtcggttgttatcttatctcaattttgttgttgaaactttccccagctacttatagttattcagacgaaaacttagatctttgttcctcactgtcattgcattgttcgtggtcctggtagcactacagaatttggttttgtttgatatgtatttttattgggctatcagcatcaattgtgaaactggtcgcagtggaccattatttctgttcttaagttatttagtttgttgtttcggctacattgatcatcgagtgtttactgaaattgtgtatgggggtttcattgtagtagtttgttgcttcggctagcgaggggtgtggaaaaaggaagggataaggcgcttggttgacccggaccggacggcaggacaccgtcgggagttcgctgcaacacatcgacggcttccgcatcttctcaggccaaggcaacaaggttttgatggaaccgatcgtattgaaccgcgaaagagccgcagcggaccgcctgaaacggatgcctatgctgtttgacgactaccgtgaagaagatttttatgggctaccacggaaatacagtattgtcgctcgggtagaagttaaattcccgaaggaaccacgtttccgtgacagacaacatttcgttttatctgacatcaatggagccaagatcgaggccataacatatatgtatgagacagtcaaacatttcgacaatttgctccatgaaaagcatgtttacaagatgcataatgtaaagttcagtcttcatccgggtgaatttaattttcgtcatctaaatggtcccatggaattgtgtcttgaccaacaaactatcgtggagccatacactgttccaattcaaatggcgccattcccaaaacaaatactcttgaaccttgctgatattgccgagttgccaaacaggactttagtcgacattatggctgttgtagtccacttggatacaatacaacgcacaatgtggggccctttcagaaagattgttataatggatgctagcatcactatccacccttgctcctgctgccactgcaccgttacatttgcacatagctggtctgcttactcaccagcaggtttctttatggagaacggagaaccaacagaaacagatcagatggaacataatgatggacgcacaccattgacaaacatctcaaacaccattactatagctgatgaaaatggatcgaaaaggcttggtccaaatgtcgatgctaaggaacgtaagaggcaaagggaaagggaaagatatgccgcgatgaccgttgaacaaaaaaacgagaaaagtagaaaacgtcgtgaagcaagccaacgaaataaaggacctcctatacagacagaggcatctagagttagtctttcagatggctgtagcacaattgatttcacaaactttgcaacacaagttccaaatgtgaatcgagatgatgatagcgattggttgcataggaatgagacattcaagtcagacgatgttttcacaacaagagaccttctgacaccaggcggtgtgcatgaaactgttggtaacacgcctaaccataatttgggaagggctgcctactttagagagcggtacaaaaacttaactccagccgagagggagcttaatcgtgaacaccttaggttgtataataatacaccaaagcggaaagggtcaaagatagagtacataagaaaacgtagagcactgttggctgacacattgagtcaggagtccatcgccatggagtccccaacatatacccctgaggttgtacaccctacaacagatgcaattgaacctaatggatccgctcttaccccctccgactgggttatccctgatatcgccagtaacccgttcctaccagcttcaacacagactgaggatgccgattcactgcgtatgtctactagaccactaagacgtaaacaacatgtgccacgtggtgaaagacaagctatcttagcccgtcgaaaccggcaatttgaagcatccatttcaaggaacatggctaatgtggctgaggatattattagtgatgccgaggaagaggatgattcgacacaaacccatatgtctgcaaagatcaacaacaatgttgatgacgatgacggtgtcgtatttgaagacgatgctgatgagaacgagggatacctattcgctgggcaatatgaggatactgatgaggatatagagatcgatggtagtcaagatgaatcgagtgccactgatgttcctgacccgtacgacaaggtgtatagcaacatccctgaagaaacacatatgctaaagactgttcccaactgcggttattgcaccgcgaagaagtttgagtatgagacacctggtttttgttgtcgtggtgggaaggttgaactagccccacttgagacccctccccaactcaagaggttgtgggatagtgcagactctgatgctaggcactttcgtgataacattagagcacagggcatgatgtaccacaatatcaagtcctttggtagggagggtggggcagagcataaacaccttgagctttacttttatgatgatgatcccactctcgagcatcggtaccgtaagtgtcgcgaagagcatcaacagaaagacaaagaggttattcgacagatagtcgacatactacgtggaaacccgtactcggagcaccttaggaccatgggccacgttgataaccttgatgactatcgtatcgcattgaacctagaccagacgttgaaccagaagacatataacacacctctcacttccgaggtggccgctgtctggatcgaagggagcgaagggcgaggccagttcagcaagagtgttatgctccatgggaaggacagttcaaaccactgcatccgctcataccatggatgctacgatgcactatcatatccattgttcttccctagaggcgaacttggatggcatgcaaatatcccaaaggttggagtatccatggacgaagttgatgcatatcgtgcgacacatagggcaagtaatgcaaatgatgaagatgcagaatctccaagccatttatgtgtgtctgtacgtgactactattgctacaaattccagattcgccccggggtattcaatccaatacttcatggaaagcggcttttccagcagttcgcggtcgacacgtacataaagattgagagctctcgtttagattacatacgcaggaatcaggatcggttaagggcagacctgtaccagggcttggtggatagcatgctagatggagatattagagcagagaaggttggcaagcgaactgtgttgtcgacgtcgtttattggcggtcctcgtgacatgagacgtcggtatatggatgctatggctctggtgcggaagtttggtaaaccagacatatttcttaccatgacatgtaaccctaactgggatgagataaggagggagcttctccctgggcagacaccgcaagatcgtccggatcttgtagtgcgtgtctttcatgcgaagctacaagagttaaagcataggctgactaaacaggatattcttggtaaggtccgagcctacgtctatgtcgtggagtttcagaagcggggtttgccacatgcccattttctactcataatgcagaggaagtacaagctcacatgtcctgagcagtacgaccttttgatctcagccgagatcccaagcaacaagtaccctgaactacgaaaaatggttatcaagcatatgatgcatggcccgtgtgggtcgctaaacccgaactgcccatgcactaagggtcgtaaatcgtgcaagaatcattaccctcggcctttcagtgacacaaccttgcaagggaaggattcataccctatttacagacgtcgtgacgatgaccgtaaagaaaaggtccgagggtgcgaattggacaatagatgggttgtcccttataacccatacctccttcgtctcttcaactgtcacatcaatgtcgaggcatgtgggagcatcaaggctgttaaatacctgttcaagtacatatacaaaggccatgatcgtgcgtctgttgttatgagagatgcgagcaaagcagatgatgatgttgatgagatcaagcagtatagagatgcaaggtgggtgactcctccggaagccttgtggaggatatacggctttgagcttagtcagatatctccacctgtgatgcagctgcaactccatcttccaaacatgcacatggtggcgtttcacgagcggcaaatggtcgagcgagtcgtcaaccgtccaggtgttgataggtcgatgctcacatcatattttgaggcgaatatgctacacgatgaggctcgttgcatcctatatcgtgatttccctgagtggtacacttggcagagtggtaagggcaaagtatggcaacggaggaaacgagatacaggtggacaagtcggtagaatagtctctgctcatccggccgagggggagcgctactatcttcgtgttctcctaaaccacgtgactggcgccacctcctatgtggatctaaggacagttgatggtgttaccctaccgacttttcgtgaggcagcagagagaaggggactgcttgagtcggacaacacactggatgattgtctcactgaacgtgctcttttccagatgccatcgtcgctgcgacggctttttgccacaatactggtgtactgtgagccaagcgatgtggctgtactctggcagaaacacaaagattctatgtccgaggactatcaacacaagagtcagaacaaaactcatgttgagcagatggtattgattgacattaggaacatgctgcagtcaatgggaaaggacataaagacattccctctacctcctatcatcgacgcgtatgacgatgctattggtactgctagggaggtttacgaggaggaaagtatcgaaccgacagcgggagatgtggctcttaaagactctcttaacgaggaacagagggacgcctatgataagattatgtctgccgttgacaccgatcagggcggattgttctttgtggatggacctggtggcaccgggaagacttatctatacagagtgctcctcgcgacgctatgcaactag

SEQ ID NO: 312 - DNA, 2707 bp, Zea mays
ggacgcccctgctgcctgctcttttcgcgtcgccggtgtagtgccccacgaccacgatcatcaacaacaaatctctaaccgctgccaccgatccatgccgtcgtcacccccgcggctggcgatggagcatcgccgccgccagcctccagcgccctccgcgcccacctacctcgccgcaacgctcgccttcctcaccctcgccgcggtcgcctacttccgcgccgccttcccccgcttcccgcacccgccggccacccgcgggtgccgccacgacgccgaggggtcctggtccgccggtgtcttccttggggactcccccttctccctcaagcccgtcgagcactggaggatctctagtggccctggagcggcatggccagtggcgaatccggtggtgacgtgcgccgatgtggcggaggctggattccctagcagctttgtcgccaacccatttctcttcatacagggagactcaatttatatgtttttcgagaccaagaaccccattgcgtcacaaggcgacattgctgctgccgtgagcaaggatgccggcacaacatggcagcagttgggtgtagtgttggatgaggagtggcacctttcttatccatatgtgtttagttatggaaacgagacttacatgatgcctgaaagcagcaagaaaggaaaccttaagttatatcgtgccgttgactttccccttaagtgggagttagaaaaggtccttctggagagaccccttgtagattcggtcatcatacattccaagggttcctattggctcattggatcagatttaagttcttatggtgcaaaacagacaggtgaactctttatttggtacagcagctctcctcttggtccttggagttcacacaagcagaacccaattcgtaatacaggcaacaggccaagtgccagaaatggaggcaggccattcatttacaatgacaatctttatcgcgtaggcaaagatcgtggtggtggatctggctataccatccaagtattcaaagttcaagtcctaacagaagatcattacaaggaagttgcagtcccatttgtgcttgacaaacccctcaagggccgaaacgcatggaatggtgcaaggtcccatcactttgatgtccagcagcttccatcaagtcaacattggattggggtaatggatggtgacagagtgctctcaggtgactcaattcaccatctgactataggctgtatgttttatggtgctgcttgcattttggtccttctacttggtgggcttattggtgcaatcaagtgcaccttaccacttagatggtatttaccacatactgagaaacggagtgacaactttgatatagagaagcaggtattgctgtgccataagcttagttggcttatctgcaatgtgaacaggttgggatctcttattggtgggaaaattaattacagagcttggaaagaccgagtttatatagcttttataatattggtatcggtagtcctaacttttttggggactaactacatctttggtggcgatggtgcagaagagccatatcctattaggggtaggtattcacaattcacattgttgaccatgacctatgacgcccgattttggaatctgaagatgtttgtggagcattactctaaatgtgcatcggtgagggagattgtagtggtctggaacaaaggtcgagccccagtgcaaggtgaattgaagtctatggtgcctgttaggatcagagttgaaaacaataatactctgaacaacagattcaaaattgacaaagaaattaaaacaggagctgttatggagcttgatgatgatatcatgatggcatgtgatgacttagagcgtgggttcaaggtatggagggagcaccctgatagaattgtcggatactatccacgccttgctgagggctggcctctggaataccgcaatgagaggtatgctcggcaacaaggaggttataacatcatactaacaggagcagcatttatggatcatgaactagcctttaagaggtactggagcaaagaggctgagattggcaggcagattgttgatagtttctttaattgtgaggatattctcctaaatttcttatttgcgaatgcaagctcggcaagcacagtggagtatgtaaaaccagcttgggcaattgatatgtctaagttctcaggagtagccattagtcgaaacacgcaggaacattaccatgctaggagcaaatgccttgctatgttttcaggaatctttgggaatttgacttccaagagaacaaatgatcttatctcccttcagataaaccagaggttatcacaaagtattcctggttatttcactttgcacaattacattacaggattgatgctaccagaaggaaaaaggaataaattgtcagactttattcgatgggagaatggtaaaccaccacctcttgctgcaaaatattgtggcatgagggttaatgttctattttctatgcacctaagcatcatgttctttcagaaagccgtttgtgaggtccaatttacttacaatcaagcaaaggacgatgcagcctgcagctccagggaaaagcgcgtaccaaagctgcaaactgtgaaacttggggccatcgataaacaagaggggcaagctcgcagctgcaagaatccagaaatcataagcagtgaacaaaacaagagttcagtaaggaggagatga

SEQ ID NO: 313 - DNA, 2469 bp, Zea mays
cccggtgagctgccactgccagcttccccgtgcgcgagctgtgctgctgctcggcggcgcgcccactccccggccgctccctcgtcactccgcctgccggtaatcggtctctatatatataggtggttcgaggtgatcggcagaaccacacaggcaaagatggcgagcgtgcacaaggccaccacccttgttctcatgttctgcctgctagcgctggggagagcggagtacctcaagtacaaggacccaaagcagcccgtcgctgttcgcatcaaggacctgctgggtcggatgactctcgccgaaaagatcggccagatgacgcagatcgagagggaaaacgccacggccgacgcgctggccaaatacttcataggtagcgtgctgagcggcggaggcagcgtgcctgctcctcaggcgtctgctcaggcttgggccgccatggtgaccgagatgcagaagggcgctctttctacgcgtctgggtataccgatcatctacggtatcgatgcagtgcatgggcacaacaacgtctacaaagctactattttccctcacaacgtcgggcttggagctaccagggaccctgacctcgttaagagaattggagaagcaactgctcttgaagttagagctactggaattccttacgcctttgctccctgtatagcggtctgtagagatccaagatggggacgttgctatgagagctacagtgaggatccaaaggttgtccagtcactgacttcactcatctctggcctgcaaggtgacgctcctgcggattccgcgggaaggccgtatgttgggggaagtaagaaggttgctgcatgcgcgaagcactatgtcggtgatggtggaacgcataacggaatcaacgagaacaacacgatcatcgacacacacgggctgctgagcatccatatgcctccttactacaactctatcatccgaggtgtctccacggtcatggtctcctactccagctggaacggagtgaagatgcacgcgaaccatttcctggtcacggattttctcaagaacaagctcaagtttaggggttttgtgatttccgactgggagggcattgatcggatcactactcctcctcacgccaactactcttactcaattgaggctggtgttggtgctggaattgacatgatcatggttccattcagatacacagaattcatcgacgatctgacgacacaagttcagaacaaggtcatccccatgagcagaatcgacgacgccgtctacaggatccttcgtgtcaagttcaccatgggtctgttcgagaacccttaccccgactctagcctcgccggcgagctcgggaagcaagaacaccgggaactggcgcgcgaagccgtcaggaaatcccttgttctcctgaagaacggcaagtcctcctacgctccgttgctgcccctcccgaagaaggccggcaagatcctggtcgccggcagccacgccaacgacctgggcaaccagtgcggggggtggacgatcacgtggcaaggaagcagcggcaacaccactgccggcacgacgatcctctccgggatcgaggccaccgtggaccccagcacgcaggtggtgtactcggagagcccggacagcggcgtgctggccgacaagtacgactacgcgatcgtggtggtcggtgagccgccatacgcggagacgttcggcgacaacctgaacctgacgatcccggcgcccgggccgagcgtgatccagtcggtgtgcggggccgccaagtgcgtagtggtcctcatctccggcaggccgctggtggtggagccgtacctgggcgacatggacgcgctggtggcggcgtggctgccggggtcggaggggcagggcgtggcggacgtgctgttcggcgactacgggttcacggggaagctgccgcggacgtggttcaagtcggtggaccagctgcccatgaacgtgggcgacgcgcactacgacccgctcttcccgttcggcttcggactcaccaccaagggcacgaagtgagtgagtgtgaggcgctctgatgggatgtggcctgtgagtgagctgtgtattcgtgggcgggcgtgaggctctttggctttcgaattggttgggggtgacgggcggcgagtcgtgtacgccgcacacattgcgcagcgtacgttgggttgggatgtttgcgtctgggtaataacagtgatgcattcttgagatggttgctgttagtgtgggttgtttggaatgaacaataagatcaggcgcgttacattggcacgctactacctctcctgctgagaccagagatggcgatgtgcatttacccatcggcccgtgctattccataccctatttagccgtgtactgataaaagaatttgtcaaaccgtgtacgggtaaaatcatgtatccatgtactgctcactataccgtatacgccagctacttctactaccaatattactcg

SEQ ID NO: 314 - DNA, 3602 bp, Zea mays
aggactccacccgctttcggctttccttcgcatttcccgttccccccacctgctcgcggcatccgcttctcgtcgttgtcgtcgctcctcctcgccgaccgggacgcggagacgatcgacgcaagcagaccctagccgacgagctcgcagggagccgggagggatgaagagcctgttcaagagtaagatcaggtggcagcaccggtccaacgacccggcgtccccgtcggggcagccgcagccacagccgcagcaggcgttgggcccgccgtcgccgtcgccttcgagctccccgtcgtctgcggcgccgctctccgtgtcaacggcggccacctcctccccctcctcgcccccctccgcggcggcgacgcccacgggtgctggggcagcagcggcagcgggagcgggagcggcaggggaggactacatagcgtcggaggaggagttccagatgcagctggccatggcgctgtccgcgtcttccaacagcgattgcgtgggggacctggacggggagcagatcaggaaggccaagctcataagcctcgatcgcttcgctgcccaccgcgacgagggccacaccgcggagtcgctctcccgccgatactgggactataactttcttgattatcatgagaaagttattgatggcttctatgacatctttggctctatggaatcctctaggcagggaaatatgccatcattagcagatctccaaacaggcataggggacctaggctttgaagtcattgtagtaaaccgtgccattgatagtaccttgcaggagatggagcaagtggcacagtgcatcctgttggacttccctgttgccaatattgcactcttagtgcaaagaatagctgagcttgttacagataatatgggtggacctgtcaaagatgctaacgacatgctcacaaggtggctggagaagagtactgagttgagaacctcgctacaaacaagtttgttgcctattggttgcatcaagatagggctatcacgtcaccgtgccttacttttcaagatccttgcagatagtgttgggattctatgcaaacttgtcaaagggagcaattatactggtggtgatgatgacgatgctataaacataattaagatggacaatgaaagggagtttttggttgatctgatggctgctcctggtgctcttattccagcagatatcttaagttggaaaggcaattcgttaaattctaatagaaaacttggcctgagtcagacagctggatcatcgagtaccgttggtgctaatatgggtcctagtgtattgccacttgaacctaaaggtgatcagctgcctttgttcagcagtggtgattggatatcagagagtggttctggatatggggcagcagaaactgcagcttctactcaaacctcttctggtgccacatcatctgttcctgctggaagtgcttttgacagttcatggatgctgattaatcatgaccaatcagatggaccatcaacttctgctggtacatcatcccagcagaaagttgtacctcaaaacgaacatccacggaatttaaaccgtcttccagatttgcaggaaattccagagtcaaaaaacctttttgctgaccttaatccttttggggatacgaagtccaagaaaacttcagtaccattcaaaggaccagatcaaaggaacaatgagttgcaaaagcgcagagagaacattgtccctaatggtggaagaccacagcagcggttagttatgaagaattggtctccttataatgatgtttctaacaacaaacagtacaattatgtcgaggattcatttgcacgtagaaatgttggcaacaatgccgcatcatcatcatcccagataacacaacaagccgcaaggtctaatcttaattctggattgcgtaatgatgcatcatatcataattatgatagtattatggctggtacctctgccacgaatattacatctacagctgagactgggaaggttcctgaaagggttctgcgtggtgatttggataaaggtcaaacaaattatagacttcaggatcaacatgttgtaggtcaaccaccacaggaaagacttccatggggtaatcctgctgaaggaagagttccaatgaatagatttcagaatcaagcaaaacaacacatgggaaacattgatacaaagcaagaccataagaaattgctccctgatccaaaaaaatctccccttgacagattcatggacacgtcattgccatcaagaaacttggacgtgaggtcacagaggcttgactttgatgatgtgtctgaatgtgaaattccttgggaagatcttgtgattggtgaaaggattggcttaggttcatatggagaggtttaccgtgctgactggaatggaacagaagtagctgtaaaaaaattcttggatcaagatttctatggtgatgctctggatgagtttaggagtgaagtccgaattatgcgtcggctgcgccatccaaatattgttctctttatgggtgctgttacacgccctccgaacttatctattgtatctgaataccttccaaggggaagcttatataagatccttcaccgccctaattgcctaattgatgaaaagcggaggatcaagatggcccttgatgtggccaaaggcatgaattgcctgcacactagtgtacctacaattgttcatcgggatctgaaatcgccaaacttgctggttgacaataattggaatgtaaaggtttgcgactttggactttcacggttaaagcacagtacgtttttgtcatccaaatccactgctggaacacctgagtggatggcacctgaggttctacggaatgaacaatcgaatgaaaagtgcgacgtttacagctttggtgtcatattatgggagctggcaacgcttagaatgccatggagtgggatgaatccaatgcaggttgtgggggcagttggtttccaggatagacggcttgatattcccaaggaagttgatcctctggtagcaaggatcatattcgaatgctggcagaaggacccaaatctgcgcccttcatttgcacagttaacaagtgccctaaagactgttcaaagactagtgaccccttctcaccaggagacccagagcccccatgttcatcaagaaatctcagtgaacttgactccataggagggctgtcaacttcccgttgtgcatagtttttgttcttttgccgtttgtgttttgtccaagagcccgcaaatgcgggcgcggcttgtagattgagcgccccaggcggtggtagacactctgccgtctgcgacaaggaccccgtggtagggtatgtatagagttgcccatcatcgggagaagtgattcagtgtgtagcaactgatcgtcaatccctcttttagtcctttgtacacccaaccggtcgaccgggtgcgagccctctgaaagcagtgagctctgtgttcattgtgaagtgcgtggctatgctaagtggattttctgtcttgctgcgcaataggcagcagcgtatctggaagtttgaagcgttgtaaaactctgtacaatcaggacacttgaatacaggatacatacattgtgttctttgttt

SEQ ID NO: 315 - DNA, 2105 bp, Zea mays
cgagtttccacacaaagcaacgccgcgccacggcctttaaatgcctcgccatcttcgccgctccatccaagcacccacgccacactcctcacctctcctcgctccacgcacgcgctctctcacccgctggctattagtcgtcgtcccttggatttcgacacttccatcgatcctagctagctagctagctagggcgcgaccgtcgtctcggtggttgttgacaggtcccgtacgtgtgtgctcgccatggctcgtggcgacggcgggcagctggcggagctgtccgcgggggtccgcggcgcggccgcggtggtggaccacgtggccccgatcagcctcgggaggctcatcctcgccggcatggtcgccggcggcgtgcagtacggctgggcgctgcagctctccctcctcacgccctacgtgcagactctggggctttcacatgcgctcacttcattcatgtggctctgcggccctattgccggcttagtggtccaaccgctggttggcctgtacagcgacaggtgtacatcgagatgggggagacggaggccgtttatcctgacagggtgcatgctcatctgcgttgccgtcattgttgtcggattctcgtcagacatcggagctgctctaggggacacgaaggaacactgcagcctctaccacggtcctcgttggcacgctgcgatcgtgtacgttctggggttttggctccttgacttctccaacaacactgtgcagggtccagcacgtgctatgatggctgatctatgtgaccatcatgggccaagtgcggctaactccatcttctgttcttggatggcgctgggaaacatcctaggctactcctctggctccacgaacaattggcacaagtggtttcccttccttaaaacgagcgcctgctgtgaggcctgtgcgaacctgaaaggtgcatttctggtggccgtggtgttcctagtcctgtgcctgacggtaaccctgatcttcgccaaggaggtgccgtacagagcgaacgagaacctcccgacgacgaaggccggcggcgaggtcgagactgagcctaccgggccacttgccgtgctcaagggcttcaaggacctgcctcccgggatgccgtccgtgctcctcgtgactgccatcacctgggtatacgccattggccatacagactacctttcgtggttcccgttcatcctctacgacaccgactggatgggccgggagatctaccacggcgaccccaaggggagcaacgcccagatctcggcgttcaacgaaggtgtccgagtcggcgcgttcgggctgctactcaactcggttattctagggttcagctcgttcctgatcgagcccatgtgccggaaggtcgggccgagggtggtgtgggtgacgagcaacttcatggtctgcgtcgccatggcggccaccgcgctgatcagcttctggtcgctcagggactaccacgggtacgtgcaggacgccatcaccgcgaacgccagcatcaaggccgtctgcctcgtcctcttcgccttcctgggcgtccctctcgccatcctgtacagcgtcccgttcgcggtgacggcgcagctggcggccacccggggcggcgggcaggggctgtgcaccggcgtcctcaacatctccatcgtcatccctcaggtgatcatcgcgctgggcgccggcccgtgggacgcgctgttcgggaagggcaacatcccggcgttcggcgtcgcgtcggccttcgccctcgtcggcggcgtcgtgggcgtgttcctgctgcccaagatctccaagcgccagttccgggccgtcagcgcgggcggccactgatcgaacccggccggggccggccgccggcacgcagcccggcaagagctgtatgttgttgagagttgaacagaaaccatgcatgtgtgcttctgtagttctgttgtttgtggtcgatcgatgggcgttgcgtggcagcgtgggcaagcgaggcgaggtgcgcggatccaaaaaaagggccattcgatcaatcaatgtgtagtagagtacaactagacgatgatgttcacatcatttgtctttaatacataccggtttctattgtctttacaata

SEQ ID NO: 316 - DNA, 2986 bp, Zea mays
atggggggcgtgccgcagccgccgctggtgccgcgccaggaacagccgccgctggaacagccgccgctggtgccgcgccagggactcaggacagccggacaaggaagacaggactcaggagttagggttggctggattgggaggttgatgtcctcgtggtgccacgccgacctcgccgccaccaagcgcgccacccatgtcctcaccgacctcgccaaaattatccttgcctatagtgttgggattccatgcaaacttgtcaaagggagcaattatactggtggtgatgacgacgatgctataaacataattaagatggacaatgaaagggagtttttggttgatctgatggctgctcctggtgctcttattccagcagatatcttaagttggaaaggcaattcgttaaattctaatcgaaaactcggcctgaatcgaacagctggatcatcaagtactgttgatgctaatgtggatcctactgtattgccacttgaacctaaaggtggccaactgcctttgttcagcagtggtgattggatgtcagacattgattctggatatgaggcagcagaaattgcagcttctactcaaacctcttcgggtgtcacaccatatctgtgttctgctggaagtgtttttggcagttcatggatgctggttaatcatgaccaatcagatggaccatcaacttctgctggtacatcatcgcagcagaaagttgtacctcaaagcgagcatcagcggaatttaaaccgccttccagatctgcaggaaattccagagtcaaaaaacctttttgctgaccttgttccttctggggataataagtccaagaaaacttcagtaccattcaaaggaccagatcataggaacaatgagttgcaaaagcgcagagagaacattgtccctaatgctggaagaccacatcagcggttagttatgaagaattggtctccttacaatgatgtttccaacaacaaacagtacaattatgtcgaggattcgtttgctcgtagaaatgttggtaataatgctgcaccatcatcatcccagatgccacgaccagccgcaagatctaaccttaattctagattgcataatgatgcatcatatcataattatgatagcattatggctggtacctctgccatgaacattacatctacagctgagaccgggaaggttcctgaaagggttatgcgtggtgatttggacaaaggccaaacaaattatagattggaggatcaacatgtcatagttcaaccaccacagggaagacttccatggggtattcctgcagaaggaagcgttccaatgaatagagttcagagtcaagcaaaacaacacttggaaaacatggatgcaaagcaagaccataagaaattgctccctgatccaaaaaaatctccccttgacaaattcatggacacatcattgccttcaagaaacatggacatgaggtcacagaggcttgacttcgatgatgtctctgagtgcgaaattccttgggaagatcttgtgattggtgaaaggattggcttaggtacttattttgctaccaagttttgatatacactcttctgcttttgaactactcccttcggtttcgttttaactgaggtcctagccttttttgtgtgaatgttaattattgatgttttacctattataactattttatgaccatgctacccttcattaatgataagctaacgcctcgtttcctccaacgtttcgtttgccgttccatgctagcgactgataacaagcagtacgccagccaaaaacagcaaggcgcgaatcgcgatagaaaaaaaacggcagtgcgacaatgtaaaatagtgtcctgaaaaaaaatgccaagctatgtaaaatatgccatgcaaaaataaacgtgctatggcaagactcgaacccaagtgctcgggtgtttttgctatagcaagcaaccagtaggcatcaaagcagatctggttgaggtggccacgatacatatttaataagggtacaacaggaaatcacacataattaatcactccttggtatgctaaatcatgtcctaaatgtcaattaaaacgaaactggagggagtaataacataaagctgttttggaaactaattttaaatatgctgaactgtatttcaagttgttagctttgatgggtatgctttttattggttgaataggagtgggttggttgcttgaacttgcaccttcctgatctctgcatgaaaactattgattgatttgcttcgttcaataggttcatatggagagatttactgtgctgactggaatggaaccgtaagtagttcattcacccattttagttttttgtatcttgagcttggccatttgttcaagatgttctgtggaagccataaaagaatcagatgagaaaccaaatcatggtcaatgcactgaagttttcatttattttcaggaagtagctgtaaaaaaattcttggatcaagatttttatggcgatgctctggatgagtttaggagtgaagtaggtgaacttttatctgtttctatcttggagttttcctaaataaactattcaattttcatatttactcagttcaattgttgatttattgtttgatatacggatatactttttgacaagattcgaattatgcgtcggctgcgccatccaaatattgttctctttatgggtgctgttacacgccctccgaacttatctattgtatctgaatatattccaaggtataatagttacttttactacacaatcactgtttatatggaatgtgtgaattaaatatcccactctagacaacacagaaggtatagactcgtgcccgcgcaagaacgcatgggcatattttcatcctttatttctctgacagcgtaatttaagcggtcctctaaatataaagaatgctactagattatctatatagagtttctctgtcatttcctttacctattttaatatttaaaacaacaaactt

SEQ ID NO: 317 - DNA, 336 bp, Zea mays
atggaccacgtggcgaggctggcgtcggagcgcgcggtggtggtgttcacggcgagcaactgcagcatgggcgacgtggtgacgtcgctgctgagcagcctgggcgtcaacgcggcggtgcacgacctggacagggacccccggggcatggagatggagcgggagctggccaggaggctcggcggcggcggcgggcgcggcacgacgacgacccccaccgtgccggcggtgttcgtgggcggtgacctcgtcggcgggaccaacagggtcatggctctgcacctctccggcgagctcgtgcccatgctcaggaaagccggcgccctctggttgtag

SEQ ID NO: 318 - DNA, 3730 bp, Zea mays
accacaatcgggtgaggggcgtccattgcgagttgcgactgcgtcgccgattcccctgccggcatgtccagtccgcgccctcccctcggccggatcctccgcctcgccgtcgccgtcgcggcctgcgcctgctttcctagccccgtctccggcatccggaagggcattgactttattcaaccaattgtgtgcagaagcactgttcaggggcggcatctgatctctgatgataatggttatgtatgttctgcactttcaatcaatccatggtctcactgctgcccaacaacaggggaccgcttttcctgccagggctgcgaacttgatttacagtgctgcaattcatatgaatattgtgtttcttgctgtttgaatccttctaagatcaagaaagaagacgtgctgaagctgaaggtagctaagccagttactgctggaacatacacaaatgttttcgatttctgcatgggacgatgccgccatagctctgcaagtgtggttcatgaaaatgcctatgccagtgatttccatcactgtttttcagtgcaacaaaattcatcaggatcaactgagtctagttctgtatcaaagttgttgggcattaacgttgtagtaggaaggcccagggaatcttgcagcttggtgtgcaaagtaagaggacagtcctgtgttccaagcaggctctctgtgttgaacaaatgtgagattttgcagaaatatatgagatgcaagagtggctgctttcccagccttggaccagatcaacctgctgaagttgttgacgaagctccaaccagcttgaatccaggagcatgcttatacatgcagatggatgagcggctcacatgtgatggttcgcaccatcatacccggcggctctgtccatgcgcctgagaaggggaaatgaatgtgacactcataagacagcagaggggtagttttctctgaaaaactttctaccatgttttaggttcatttaattgccaactgccaagatgtggacaacgttggtttgcagcttgctcactcgacaggaaacaagtggaggcgataagctgataaccgatggttctccatcacacccccatgacgaacaacctctccacgcaccggttgcgggtttcctcaacaagaacgccctactctcctcctgtttctgggaaggattatggatgcaaaatgaaatggagtgcctgcaaagatctgctccggttcttgagaagcgtcgtggatgcagaaggagatgcaatacctttcaaatccttgcatggtatctggtaggattttgcatgctgaatgaaaatgcacgcaggcgattccacgagcctttcatgcatgttttgagacacctgaaccaattatatatattcgtaatatattgcacaagcttccatgcatgttttaagacaaaagtaacccaaacagaactacggatacatgatcttttaaatcaattacaccatgccagcatctctgcaccacaaactcccatgcccctttttttttggtttccttcgccagcctgaatcaaaaagaataatcaggcttgaaatctctcatggacctgggtctctccctccctttgttatcatctttggtgtttgcactctcttctgcagcagcagctccgtctccctggtcctcctcctggaaggccgggtgggtgaggatgttcgccaggagctgcgtgcccctgagggcgttggtgagcggcaggtgtccctcgggcgtgtcgtccgtcaactcccacaagaactcgtcggggaaggccctgtagttgtactgctccacctccgtgtccagcttcctcatccagccgacccggatgaagaagcgggtgaagtcgcgccgcgacttctcccagagccgccgctgcacgctgtacccgaacctgccgccgctgtgctccttccagagcccgtcgatggcggcgaggtcctcggccgggatgaactggacctcggagaagaagacgtaccctcggcgcctcgcgggctcgccggcgaggtcgatgatcagcgcccgcgtggtctcgtccgcctgccggtagtcgcccgcggcgagctggcggcggaggaggtcgagagaggggccttcttcttcttcttcgtcccctgccgctggtgcagatgccggggcaactggagtcggagctgacgaattggtggctgaggctgctgtcaccgagggggaggttttggtgtagagcctgaaggaaatgctgccgctggtgttggtggagagcttgtgcacggcggacgcggagccgtcacggctgccgccggcgccggcgaaagaatggtcgtgcgggagaaggaaggattgcagagaagcgtttgccatgggtggcaggaggacgcagctgagctgagagcctgagactgagaatggaggggagggagacgatgataaaggagcgagtggatggggtttagtgctgcgagagctgagctgggtggtggtcgtcgtgtggtgtggagaattgaggccgtcgtgttgcctttgtgtgtgtgtgtgttcttgtgacagtccacctttgtgggtgtcgtgtgccaagtcctggcctcgatggctgtgggagattttgggcggtggttttttagggggcccattctgggcgagaatacgaaggtggggctgtgattggtgggttctgggtgagatgaggatactggctatggcaaacaatccaaacaccaacggagatagggtctgtttcgtttagcttcttttcttgacgatttctgaaaatctgaccgttagaaaaaacctgagtatcataaggattatgtgcaaggtaagataaagtgatttatagggtttaggatctaaaaagtgatgtgttttccctatcacgacgactcgattgattctgcgttcatggtttattttagatgattttcactaatggactgtttggatccatttattttgaaggaattggaatttactcaaataataggttatttcgtttgaaatttggcattctaccattttctaaaatttagatataagtatatcccaaattcttaggacaagagctagaaattgattctatgtatcgttagtccatgtttctactctacaacttatgacacgcttggctcgctttcctatacaaacatagcacataaatatcttatgttcggtatattttatgaacctaattttctaggtagatataagttaaattaattttgattttggtgtacaggcaatttatttagatagtatctaccgtcgatttatacgtgtatatgttcgtgcatgtattttatgattatatgttggtgcatgtgttttatgagtaggttatattgttaattattatgtttagttttaacgtaggttaaatttagttggtataaaggttttatttttgttattttaatgcttagtttgaatagttatttagtttaggttgtagtattaggcaaagagacttatttccttatgattctttgttttgatagatataagacatgtggcgtgagaagtgataaaatggttttttatggagatatatactcgaacgtgtcttgtaaggacggcaggacgcaccgtctctcctgagttataggtacctaattatgactgtggtaaaccaatctatgtgttttaattgaggcatctagatacaacgtatgttttttacacatacgatggttttaatgtaagtaattgtttgtaaatgtttttttgttgttccttgatgtgttattaaagaatg

SEQ ID NO: 319 - DNA, 686 bp, Zea mays
atggatgcgggcatgcggccgccttcgattgggataggatttggaggaggagactgggcccttgaaaacaatatggcaaaggaatatgcaattcttatagtccttattagcatggtacttgtggtctcctgcaatgttgtggacggtagtgcagcagacatgaggcatgcaacgcttccacgcaaaggtctaaaggaagacatcaagctcgccatcaatggagtgaattctccggttagcagtatatctggacaggcatctagcaactctgaaaccggcacagacaacgatatgtcaagcgctacagcctttacctcaaaggtgaccactacccaaggtagccaccgtggctacgagatccacgggttccaaggcagtaagatcagccccccatgatgatcgagtgattcatattagggcaatcaaatcatcagttattaatgaacaataggtatctataagggaaccaactatcaaaacaacatatctaataatcatatgttgtacttgtgtggatgtgtgtagtaccaagttgtgtattacaagttgtactacagtgtgatggcgttttccatgtggtatagcataactatgaagctttggattctcagtagtttccaaagcacatgtttatgatacacatgtattgaactgctagtacaaataaagtcgatgtctatcaatac

SEQ ID NO: 320 - DNA, 952 bp, Zea mays
tccttgtgttctttgtttcccgtcccgcggtgtgcgcgcgcacgtctgccgtctgccaagaggagtaggcagagatggcttgccctgcgcagtccatgctctccgccagcggctgcatcctcctgaggagcaagcctcgggcttcctcctcccacgtgcgagggggcatcatcggcggtggctgcagcagcaggccgttccagctaacctgcaacgcttcctcttccccgtctcctccctcgccggcgccggcgcaggaagaccccgactgcaacgacgaggagtgcgccccggagaaggaggtcgggagcttgagggccgagtggctggccgaggagaggacccaggtcgtcggcactttccctcccaggaagagagggtggaccggcttagtggagaaggacaccgccggccagaccaacatctattctgtcgagccggtggtgtacgtggccgagagcgccatcagctccggcgcggcgggcatgtcggcggagggtgccgagaacacggccgccatcgccgcggggctcgtcctcatcaccgtcgccgcggcctcgtccatcctcatccaggtgaacaagagccagccgcaggtgccggaagccgcctacaacggcccgccgctcagctattacgtggccaagttccagccggcgcagacccttgaggcccccgccccggcggaggcggtagaggcgcaggatggcgccgccactgtccaggactcggcggctccggaggcgcaggaagctgtcctcatcagctgattcggttttgtggcagcttacagatgaggttgtagtgatgtgcatgatgatggaagagacacatgtataatacattcattgtatgcatgagagagaaagggagaaaggagcatttcggagtcgtattacgtttcgtgtatatttacatatacatgcattcaggtcgcctatgcttattggaa

SEQ ID NO: 321 - DNA, 3146 bp, Zea mays
atggcggcgtcggtttccacttccagggtcatctgcctccagaagccgggccccgaaggcagcagcaggggggccagggaagtggcccccttcacccgccagtcggtcgcggcgccgaggcgcccgcacggcgccaacgcgagcgtgatcatcggctccgactccggcgccggacggggccagcattcgccgccgctcagggccgtcgtcgatgccggcccggtacagacgacgaaaaagagggtgttccacttcggcaagggcaagagcgagggcaacaagaacatgaaggagctgctgggcggcaagggcgcgaacctggcggagatggcgagcatcgggctgtcggtgccgccggggttcacggtgtcgacggaggcgtgccagcagtaccaggaggccgggcgcgccctcccgccggggctctgggcggaggtcctcgacggcctgcggtgggtggaggagtacatgggcgccgccctcggcgacccgcggcgcccgctcctgctctccgtccgctccggcgccgcggtgtccatgcccgggatgatggacacggtgctcaacctggggctcaacgaccaagtggcagccgggctggcggccaagagcggggaccgcttcgcctacgactccttccgccgcttcctcgacatgttcggcaacgtcgtgatggacatcccccacgcgctgttcgaagagaagcttgaagccatgaagaaagccaaggggctgaagaacgacaccgacctcaccgccaccgacctcaaagagctggtgagccagtacaagaacgtctacgtggaggctaagggagagccattcccctcagaccccaagaggcagctggagttggcagtgctggccgtgttcgactcgtgggagagcccgagggcaaagaagtacaggagcatcaaccagatcaccggcctcagaggcaccgccgtgaacgtgcagtgcatggtgttcggcaacatggggaacacctctggcaccggcgtgctcttcactaggaaccccaacaccggagagaagaagctgtacggcgagttcctggtgaatgctcagggcgaggatgtggttgctggaatcagaaccccggaggatcttgatgccatgaaggacgacatcgaatttactgttcaggagagcaggctgtggatgttgcagtgcaggacagggaaacgtacgggcaaaagcgccgtaaagatcgccgtggacatggttaacgagggccttgttgagcgccgtgcggcgatcaagatggtagagccaggccacctggaccagcttctccatcctcagtttgagaacccatcggcgtacaaggaccaagtcattgccacgggcctaccggcgtcacctggggccgctgtgggccaggttgtattcactgctgaggacgctgaaacatggcattcccaagggaaatcagttattctggtgagggcggagaccagccctgaggacgtcggcggcatgcacgcggctgcaggaatcctcacagaaagaggtggcatgacctcccatgccgccgtggtcgcacgcgggtggggaaaatgctgtgtctcgggatgctctgggattcgtgtaaatgacgcagagaaggttgtgaagattggaggcaatgtgctgcgcgaaggtgagtggctatcgctgaatggatcgaccggcgaagtgatcctcggaaagcagccgctctccccaccagccctcagtggcgatctgggaacattcatgtcctgggtggatgacgttagaaagctcaaggtcctggcaaacgcggatacccctgaggatgcattggctgcacggaacaacggggcagaaggaatcgggttatgccggacagagcacatgttcttcgcttcggatgagaggattaaggctgtgaggcagatgattatggctcccacagttgagctgaggcagcaggcgctggatcgccttctgccttaccagaggtctgacttcgaaggcattttccgtgctatggatggactttcagtgactattcgacttctggaccctcccctccacgagttccttccagaagggaacgtcgaggaaatcgtgcgtgaactgtgttctgagacgggagccaaccaggaggatgccctcgcacggatcgaaaagctttcggaagtaaacccgatgcttggcttccgtggctgcaggcttggtatatcgtaccctgagctaacagaaatgcaagcccgtgccatctttgaagctgctatagcgatgaccaaccagggcgttcaagtctttccagagataatggttcctcttgttggaacaccgcaggcatgcatccttttgttttgttttttttgtgaattgggacatcaggtggcccttatccgtcaagtcgctaacaaagttttcaccagtatggggaaaactattgggtacaagatcggaacgatgattgagattcccagggcagctctagtggctgacgagatcgcggagcaggctgaattcttctcctttggaacgaacgacctcacgcagatgacctttggctacagcagggatgatgtggggaagttcatccccatttatctggctcagggcatcctccagcatgaccccttcgaggttctcgaccagagaggagtgggcgagctggttaagcttgctacagagaggggccgcaaagctaggcctaacttgaaggtgggcatttgtggagaacatggtggagagccttcatcggttgctttcttcgccaagactgggctggattacgtttcttgctcccctttcagggtcccgatcgctaggctagctgcagctcaggtgcttgtctgaggggctgcctcctcgttggcagcctgctgttggtgcatctggtgattaataatactactatgacagagccatatgctctgtgaagagtattagtagcagcgctcataaaagctacagttccatctattttctcagctatgtaaaacttccaaactgttcatgcttaaaactgagggttttcgtggtgtgagatgtgcatgtcgttgttgaggccattgctgcacattccacctattgaggccctcctcaaattaagcctcgaaaaagctgatatcttttcgtagaactctagactccggtgaatgcaactggctggtttgcttccgagg

SEQ ID NO: 322 - DNA, 926 bp, Zea mays
aggacgacccaagcaagcaagctcgatctactactactactagctggtacacatactagccagcctgccagccagcttgccatggcgcccaccgtgatgatggcctcgtcggcaaccgccgtcgccccgttccagggtctcaagtccgccgccagcctccccgtcgcccgccgcagcaccaggagcctcggcaacgtcagcaacggcggaaggatccggtgcatgcaggtgtggccggcctacggcaacaagaagttcgagacgctgtcgtacctgccgccgctgtcgacggacgacctgctgaagcaggtggactacctgctgcgcaacggctggataccctgcctcgagttcagcaagctcgggttcgtgtaccgcgagaactccacctccccgtgctactacgacggccgctactggaccatgtggaagctgcccatgttcggctgcaccgacgccacgcaggtgtacaaggagctgcaggaggccatcgccgcgtacccggacgccttccaccgcgtcatcggcttcgacaacgtcaggcagacgcagtgcgtcagcttcatcgcctacaagccccccggcagcgagtagagaccgtggctagatcgacccatggccatgcctctgcctgttgatcggatcaccttcttgcattggttcctctctctctctccctccttttttttccctttatctcatcatttcttttctcctgcatgcaatggttccttttgcttccaacaattctcctgctgatgtatccagcatggcatcatccatctacaattacgtacgtagtgcaacgactgtcgattcgttgggtgaggaacatatatgtgaatgcaagctccggctaccatacatgtgtaatgtgtaatagatatatatacaaaactgccgaggcgccgacaatactttaataa

SEQ ID NO: 323 - DNA, 1147 bp, Zea mays
atcacccacctccaatggcgccgcagctcgccgcagctggcccgaccttatacgcgcctcgctttggcaccgccctcccctgccgcgcccggacaaggaagccggtctctcggcgccgggccgcgctccccaaggatgagggaagtacggggatggaccaagtaagtcggatgagtggtttgctcaagggaaaatgatggttctgtgtggaggctgggagctcttctagtcctaaagtgcttttaattcacggcttgccatcgcaggcatactcttaccgcaatgtgatgcctgtactggcggacaaatatcatgccattgcttttgattggctcgggtttggattttctgataagcctcaaccaaaatatggttttgactatacacttgatgagtatacttcatccttggaatttctagtcaatgctgttgctcctgataagctctctattgttgttcagggctactttgctccggttgcagtcaaatatgctagtgaacaccaagacaaattgaatcatcttgtactagtgaatccaccaataaccgataaacatttgaaccttccatccaccctggcttcgttcagcaacttcttgttgggtgagatattttctcaggatcctctcagagctagtgataaggtattgactagttgtggtccatacatgatgaaggaagaagatgctatggtgtatagaaggccataccttgtctctggttcctcggggtttgcacttaatgcaataagcaaagctatgaaaaaggaccttaaggcttatattgaatccatgagaagcatattaagaagcagttcgtggaaaacaaagacaacagtatgctggggcatgagagatcgttggctaagctatgatggggtggaagaattttttggaggcctaaaccagaagattgtagaactgccaatggcggggcaccatgtgcaggaggaccgtggtgaagaattaggcaatataatcaaaagtatactgaggtaatgttgttggagtctttttctaatcttgtctcttagttttctccttgtatacattaccatatgagcaaacttttgttggcttgtatgccataatcaagtgtgcgtgtcacacattcatttgaataagagaatgaaataagcattcttctt

SEQ ID NO: 324 - DNA, 2533 bp, Zea mays
agacacggctagtacatacagctacatcatcgtgacacacgaaaaagaaagaaagtgctgccatgcctgcgtacaaaaatgtcagcgtcgaatcggcatcctgtcacggtctatcagacaatggatgcaggcgcgtgcaccacgtgctagctagatagtttgctgcaaggagccaatagatcttaattagcttgtgagtataaagatgaggccatggtgcactgcgtttcatcagaccgccagcagtcgccagcccagcaaggcagagcagcgagcggctatgggaagagaggcgccggcgatggcggtagcgctgctggcggcgctggtcgcttccgcggccatgttcatgttggcggggaccgcgagcgcgtccccggcggaggggatccagccgctgtccaagatcgccgtccacagggccaccgtcgaaatgcagccgtcggcgtacgtgcgggcgacaccgtcgctcctcggcgagcagggagaagacaccgagtgggtgacggtgaagttcggctggaaagaaccgtccgaggacgactggatcggcgtcttctctccgtctgaattcaactcgtcggctacatgtccgaacccatggccagcagaagaaccctatctctgcacagcacccatcaagtatcagttcgccaactactctgcgaactacatctactggggcaagggcagcatccggctgcagctcatcaaccagcgctccgacttctccttcgccctcttcaccggcggcctcagcaacccgaggttgatcgcggtgtcggagcccatatcgttcaagaaccccaaggcgcccgtgttcccgcgcctggcgcagggcacgtcccacgacgagatgacggtgacgtggaccagcggctacgccatcgatgaggcgtacccgttcgtggagtggggcgccctggtcgccggcggcgtccggcacaccgcgcgcgcgcccgccgggacgctcaccttcaaccgcggcagcatgtgcggcgagccggcgcgcaccgtcgggtggagggaccccgggttcatccacaccgccttcctcagggacctctggcccaacaaggagtaccactaccggatcgggcacgagctccccgacgggtcggtggtgtggggcaagccctactcgttccgggcgccgccgtcgccggggcagccgtctctgcagcgcgtgatcgtgttcggcgacatggggaaggcggagcgggacgggtcgaacgagtacgcggcgtaccagcccgggtcgctcaacaccacggacgcgctgatcgcggacctggacaactacgacatcgtgttccacatcggggacatgccctacgccaacggctacatctcgcagtgggaccagttcacggcgcaggtggcgcccatcaccgcccgcaagccctacatggtgggcagcggcaaccacgagcgggactggcccgacacggcggcgttctgggacgtgatggactcgggcggcgagtgcggcgtccccgccgagacctactactactaccccgccgagaaccgggccaacttctggtacaaggtggactacggcatgttccgcttctgcgtgggcgactcggagcacgactggcgcgtcggcacgccgcagtacgacttcatcgagcactgcctgtccacggtggaccgcaagcaccagccgtggctcatcttcgccacgcaccgcgtgctgggctactcctccaacgcctggtacgccggcgaagggtccttcgaggagcccgagggccgcgagaacctgcagcgcctgtggcagaagtaccgcgtcgacatcgccttcttcggccacgtccacaactacgagcggacctgccccatgtaccagagccagtgcatgaccagcgagaagacccactactcagggaccatgaacggcaccatcttcgtcgtcgccggcggcggcggctgccacctgtccagctacaccacggccatccccaagtggagcatctaccgcgactacgacttcggcttcgtcaagctcacggccttcaaccactcgtcgctgctgttcgagtacaagaagagcagcgacagcaaggtctacgactccttcaccatcgacagggactaccgcgacgtgctcagatgcgtgcacgacagctgcttccccaccacgctcgccacctagttaataaaactaccacttattggtagaataatgtgccccgtcgaggcacactgtactgtagctgtattcatgatagcgcacgtacgcagggagtggtgttgctgtgctctgctccctcgatctgtgtattaaatatcactagctagcccgtgcattaccacttattctcagttggtgccgtagggcttttgtgtgctggtgtggtttaatttccagataaggctatattcggtttcctggaatataatttaagacttgttcggttagctttcaatctatgtggattgagtaggattggatgaatttgaatcttaaacaagtcaaacttattcttaattgttttccaattacatccaatccatgtatattgtg

SEQ ID NO: 325 - DNA, 5829 bp, Zea mays
gcgccgttctcctctctctctctttccccgtctcaagcttgcattttctctctctctctctttccccggtggtgcggtgcggtgcgggtgctggactgctggcctctgcgtccgcatccggcgggcaagtgcgaaagctgccaactctttccctgctcggtggcgagtgaggcgctgctggtggtatgcaggagctaggaggtaggcaacaaccatacgaaggcaagggcgagcggagccgaggcacaccgcgcgttctgcgccgaccagcactgcccgatctcgcgcgggggaggggggattcgtgagcgccggcggcagccatgccggagtcctggagacccgccgaggcggatgccctgcagccggcggcaggcacggcgtccgcgtccggcccctcggctcggagcccgggcaatggcgccaaggggcgcggggcgggggagccccccggcgctgcggcgacgcgggtgccgttccacaggctgttcgcgttcgcggactccgccgacgtggcgctcatgctgctgggcgcgctcggggccgtggccaacggcgccgccttgcccttcatgaccgtgctcttcggcaacctcatcgacgcctttggtggcgcgctcagcgtccacgacgtcgtcagccgggtgtccatggtctcgctcgacttcgtctacctcgccatggcctccgccgtcgcttccttcgtccaggtcacctgctggatgatcaccggcgagcgtcaggcggcgcggatacggaacctgtacctcaagacgatcctcaggcaggagatcgccttcttcgacaagtacaccagcaccggcgaggtcgtgggcaggatgtccggcgacacggtgctcatccaggacgccatgggcgagaaggtcggcaagttcgtccagctgctggtgaccttcttcggcggcttcatcgtcgccttcgcgcagggctggctgctcaccctggtcatgatggcgaccatcccgccgctcgtcctggcgggcgcggtcatgtccaacgtcgtcaccaagatggcgtccctgggccaggcggcctacgcggaatcgtcggtggtggtggagcagaccatcggttccatcagaacggtcgcgtctttcaccggcgagaaacgggcggtggacaagtacaacatgtccttgaagaacgcgtacaagtccggcgtccgagagggcctcgccactgggcttggaatgggcacggtcatggtgctcctcttctgcggctactcgctagggatttggtatggcgctaagctcatcctggagaaggggtacacgggagccaaggtcatgaacgtcatctttgcagtcctcactggttctctggctctaggtcaggcgtctccaagcatgaaggcgtttgcaggtgggcaggctgccgcacacaaaatgttcgagacgatcaacagaacgccagaaatcgacgcgtacagcaccacggggaggaagctggaggacgttcgaggggacatcgagttcagggatgtctatttctcctacccgacaaggcccaacgaacagatattcaagggtttctccctcgccatacctagtggcacgacgatcgcgttggtaggccagagcgggagcggtaaatccacggtcatcagcctgatcgaacggttttatgaccctcagcttggcgatgttctgatagatggtgtgaatctcaaggagttccagttgaggtggatcagaagtaaaatcggccttgtcagccaggagccggtcctttttgctgccagcataaaggagaacatagcttatggcaaagacaacgcgacggatcaggaaatcagagctgctgctgagcttgccaatgctgccaaattcatagataaaatgcctcagggttttgatacttccgttggtgagcatgggacacagctttctggtgggcagaagcaaagaattgcgattgcaagggctattctgaaagatccaagaatcctactattggatgaagctacaagtgctctggatgccgagtctgaaaggattgtgcaggaagctctcgacagggtcatgacaaacaggacgacagtcatagtcgcacaccgtctgagcactgttcgaaatgctgataccattgctgttattcatcagggaacactggttgaaaaaggtccacacagtgagcttctaagagatccagaaggagcttatagccaactgataaggctacaggaagcaaaccagcagaacaatgggaaggttgatgccaatgctcgtccaggcaaacaaatatcaataaacaagtcagctagcaggaggtcgtcccgtgataacagtagccaccattcattctcagtcccattcggtatgcctcatgggattgacattcaggatggttcatctaacaaactgtgtgatgagatgccacaggaagtgcctctcagccggcttgcatctctcaacaaggcagagatcccggtccttatactaggctccattgcctcagtcatcagtggagttatcttcccgatctttgcgatactcctgtcaaatgtgataaaagcgttctatgagcctccacatctcctaaggagggattcacagttctgggcttccatgttcttggtgtttggtgcagtgtacttcttgtcactccctgtcagttcgtaccttttctccatagcagggtgcaggttgattagaaggatccgactgatgacatttgagaaggtggtaaatatggaggtcgagtggtttgatcacccagaaaactcaagtggagcaataggtgcaaggttgtcagctgatgcagcaaaagttagaggccttgtgggggatgcgcttcaattggttgtacaaaactcttcgacactagttgctggtttggttattgcatttgtgtcaaactgggagctatccctcatcatcttagctttaataccactcattggcctaaatggatggatccagatgaagtttattcacggtttcagtgcagacgcaaagatgatgtatgaagaggcaagccaggtggctaatgatgcagtaggcagcataagaacagtggcctcattctcagctgaagagaaggtcatggatttgtacaagaagaaatgtgaaggtcctctaagaacaggaatcaggacagggattataagtggaatcggttttggagtttcctttttcttgctatttggggtatatgcagctagcttttatgctggtgctcggcttgttgaggacaggaagacaacctttcctaaagttttcagggttttcctagctcttgcaatggcggcaattggagtgtcgcaatcaagtacccttacatcagattcttccaaagcaaaatcagctgcatcttctatatttgcaattgtagatcgaaaatcaaggatagacccaagtgaggatgcaggggtaactgttgaggcactacaaggaaacatcgtattccagcatactgttgcactcgttggagagagtggtagtggcaaatcaacggcaatttcattgctccagaggttctatgacccagatgtaggccatatactactagatggcgtggacatacagaagttccagcttaggtggttaaggcaacaaatgggcctggttagtcaagaaccagctttgtttaatgacacaataagggcaaacattgcctatggaaaagatggacaagcaacagaatctgagatcatatctgctgcagaattggcaaatgctcacaagtttatcagttcggcgctgcagggatatgacacagtggttggagagcgtggagcccagttgtcaggagggcagaagcagcgagtggcgatcgcccgtgcaattgtgaaggaccctaggatcctgcttctggacgaagcgactagtgcgctggatgctgagtccgagcggatcgtccaggacgcactggacagggtgatggtgaaccggacaacagtgatcgtcgctcaccgtctgtcaacaatacaaaatgcagatttgattgcggtcgtgaggaatggggttatcatcgagaagggaaagcacgatgccttgatcaacatcaaggatggcgcctatgcgtccctcgtcgcccttcactcggcagcctcttcatagcaggtgatggtatgggatcctgcatacgtctgctaagacatatatgaacagagcgagctggcacaacctgtgtagcaatccaggtgctagtctctgttcctctatttgatggcatacataattgcttatacctaagcggagaaatgttacaaatagcaaggaccagatgtaaatgcaaggagctggtccttaagataactttttataatctataaatcttaatatgtatatgtagcttcgaacatagaaaccaaatagatgatggttatgctataactcatgatgttcttgctgtcgtttcccccctttatagcttatatgcaagtaatgataaccctgctcaggaaagaaagggcagctcccaaacgtttaatgataaccatatggctggaaaaactgagatgaaatgctgaagaatggcttctgcggaagcataaatttcatggcaaaggctatcaggttgcaacttctaaggtctggccaaaacagtatgtttttaatgtgaaaagggcatactaaacggaaacacaagttctattttgtaaaaaaaaacctcaactgaaggggcgggcatcctgatcaactgactctgaaacgaagtaactagtaatccaagtgatttccatttggctgacggggctcgttcggttgcgcatggattagagaaggattaaatcccttccgatttaattttaactaaaaagagatttaatcctctgttgcaattcctgtaatccccttcaaactgaaccaggcctgacggggaagtgtacaatattttttttttcacgctgacaaccaaactgtacacacgtgtttctgctcttgcaaaagagcgagcacatgagttaatttctggcaagatttactgaaacctatgaggaaaaaaatatatcgtacccctcccaatttgcattttctagaaactagaaaagcggagaactaatttggcaatagcactagcgactttggctatcaacaataatcagtaggagaaaagacgggggaatttgtgaagcagtaaaacggaaaaactagacacgattgcttaagcttcatcggatcagagctcacctgaagtcccgaaccatggtttctgctcgttaataaaggatgaacgcggcagggattgtctccgatgtcccttcctatttttgtttcccccatcaacagctcgcggccgatggcaggcgtccgcgccaacgggggcggtaccggtgctgcgagcagcacggctcttcctcgaattatggaatcacaggcgaaaacctagtaacaaagctcaaggcagaacgaacctcgtcgacggcgcggctaggttgtgaccgccagatcttagcgccggaggccgccatccgatcaccggtgcccagttctccggatgtccggatagaacctgacctgaagaagaacagcgcgcggcgtttcgcggatctctgtctccctctcccgtgcacaacgggcatagatagatggagttcggaggggagaaatttgtgctggtgccgaggggcgttgacattgtccgccttgtttgatcgagatggcggagttgttttgacttttgtggaaacggattcggtgggttggagttgcaaccggcgatggcgcctttgtttcctgcatgttgcatccatcataataaactaggtgagtgatcgtgcgttgcaacggaaccgtataataacacgataacttatgtacatatgtgtgttatattattatgagaaaatgtttcgaaatt

SEQ ID NO: 326 - DNA, 1317 bp, Zea mays
atggagccggcgaaggggaagccgaggagggcgtcatccagcctgcttctgcgaatcacggacatctgcaaggtgcattccgtcgctgtggcggagaacgtcggcgagaagcccaacgccggcagcacaaccggcgggggcagcagcgaagacggcgcgcacctgaaagtatatccacaccaagtctctgaccacgagagctgttccggaacttccaccgcccgctacgaggaagcggttgtcgagaggcttcttggcgcggtctctggtctgaagctggcctatgtgaaggttcagcaggcacatgtgccgtatgatcctgaaagggttgcggtcgccggtgagcgttttgcgtcggagcttgaagagacggctgggcttaaagatctctacttcggtgccgataagtggagcaatccaatgcaccagtctcgtgtcagctcacggatccatgagcgtcaaaggctcgccctggagctgcaggccgacatatgcaagaaagactctgagcttgttctgctgcgagcagagctcgaagaactggaaaggagaaatctggagctgaaggaggaggctgaccagagagcgtcgcagatgaataaagaaataagtttcggcattggcaaagtgggatcggttgatacgttcatcgagttgtttgagaactcgtcgaagtgtatacatgatttcacaaagctcgtcgtcagctggatgaaggtttcagctggatgggacctcgactgctcaaagtttccagccgatagatcccttgtgtttgagaaaagggctcacaggaagtattgcgttgaggcctactttgctcgggcgatgctggcggcgaccaaagaggagtatttctccatggattccttctaccgtgttatgagttcaaaggacccattcgacgctcttgtggagtcaccaaattccgcctttgggagattctgccgggagaagtatctggttgctgtgccaagtactatggaggtatccttcctgggaactctggaccacagagcatttgtcgaggcgggcggccatccaaggacgcagttttaccagacatttgcgaggatggctagatctgtctgggcattgctcacggttgctcgcctcttgaaaccaagggccgagatgttcttcgtcaagagcggcgttcggttccaaaggaagcacatggaaagcgtaccagctaggctgaccgcggaggaagcaaagatcggtgttgggtttacagtgatgccgggctttaagatcggatgcactatcgtcaggtgcagggtgtacctgtctatgctcaacgcaagaggcatctag

SEQ ID NO: 327 - DNA, 783 bp, Zea mays
atggccacttatctcaacgcaccgccggcagccaccacgacgactgcaagctgccgccatgccttctccggtggcagcctccgtctactccggccgagccgaccgacgctgcacgtgacgtgccaagccgccgcctcctcccagcagccgtcgtccccgtccaggaggtcagcctgcctcctcggcatcgcgtgcgccgtcctgctccgcccacgtgccgcctccgccgccgaaaccgacgacgagccggccaacaacggctggtggctgaccgagttccccttgcccgtgcccaagatcgtcaacagtaagccgtcccgtccgtcctgctccatccaccacttaactttacttggttcactgacaattgtgtcggcgatgagtggcatggcagaggagatcaacaacgcggagacgggcacgcgctccttcctcaagaacggcatctacatggcggacatcgggcccagcttcgcggcgcacgcgtaccggctgcgcagcacggccttcgacctgctggcgctggaggacctgctgggcaaggacgcctccaactacgtcaacaagtacctccgcctcaagtccaccttcatgtactacgacttcgacaagctcatctccgccgccgaagacaagccgcccttcgtcgacctcgccaaccgcctcttcgacagcttcgagacgctccaggaggccgtcacagccaaggacgacgccaggatcggcgaccgctacgccgagacaaagctcatcctccaggagctcatggccaagatggcctag

SEQ ID NO: 328 - DNA, 3148 bp, Zea mays
acagaacactggaccgtccggtcacaacgagatatttatctctccatgctccgtccgccgcaccgtgccgtttcggctgcgcgcctgcgccaccccatcccgaggcggccgggagagcggaagcgcaaaaccctctttcagtctttctgctgctccggcaccatgggcggcacgtccaagctgctctcctccctcctcctcacttcctccccgctacgcctccgacccactactgccgccgccgctgcgctcttcctcaccccgcccgcggcggcctcgcgccgcctgctcctgctctcctcgccttccccgccccgcaccctctccacctcgtcctcttcccttccgcacggctccagccaggcctccccggcgccatcgccccgagctccattccccgagtggtcccgcctcgtcgaccggcttgccgccgccggatacggctccggcgctccctttgccgctgacgatctcgcgatcgcccttgcctccggatgcggcctgtcggacggggcgctggccgctgtttccacctgcctcgcattcgcgcgggaccggcctgacctcctcagttctcttccaaggaaggatgtgaagatcctggtggccaatgcggcgccgtccctgttcaaagacggggaggcatcagcgctgcggcttcggcgctaccttgctggggaagaaaccgatgtcattgtttcggacagagctgaaactgtcgatattgttcgatatctgctaagttacacatacggttcttctgtcagcgactcagaacacaagaaacttattgattctgccgtgagaaatatcatggctgagttagtgagttttagtggtctttcccaatcgtccacttttgaggaatcaactcccaaccaaatttgctcgagtcagcttgaacgattttccaggcctccagggcaaaatatcgaaatgaagcgaggtgactggatttgcacaagatgtagcttcatgaactttgcaagaaatgttaggtgtcttgagtgcaatgagcagcggccaaagaagatgctgactggtggagagtgggaatgccctcagtgtgatttctataattatgggaggaatatgtcatgtttaaaatgtgattgcaagaggccagcaacaatcccatcgattcctgcatctgttggttctggtttaggtggtgtggcacagcttcttagtgtaacgagtgctggtaaatctgaaattgagagaaaacttgctgaaagtgataaaaaagcagaaagatggttgagcaaagtatctcaacttcaagattcagctgacttaagtagtctagcagaagatgaggactttcctgagattatgcctatgcgcaagggggtgaataagtttgtggtgagcatgcacaaaacaccactggaaagaaggcttacaaatgcacagtacagaagtaacaatagccccccagcatccgacccaaagataagtcaaactttggacaggatacttgggcgttcaactcctactacagccccaaacaatcaatctgttactagtgatgcacctactgaagctctgaagaaatcaacagaccacctcggtggcattgatcctgttccgtttgtgcccctgtctgcagatctctttgcaaaaccacagactaataatggacagagcaatcagaatggaaaaatcaatgcagaagatgacagttccatggtaaataatgcagtccctttacctgagaggcaaagcacaggatcattagataccgctgagatatggtctgagaaagtagcagaacctgacaatgcaaaggattccccaagtgcagtttctgatgaaaattttcctgagattatgccaataaggaaaggtgaaaaccgatttgttgttagtaagaaaaaagatcgctcattgacatcacaacagtacaaaaggcgcagtattcttgagcaggcagacagttctgattttgtcccatttgttccatttcctcctggctactttgccaagaaagatacaccaatagagagtactacagacacaggaatcgtgcccgaaggcagtcaaccaaaaggtaacctgaataatgggaactggaacataaattacaataagcatcaatcacaatctcatggggcacaatgtaggcctagtggtgctgcatatactggcactcggatcatgggcaactcccaggggaactacaatgggagcaatggtgaatctacttaccatggagctaactttgaacaggaaccttataacaaaggttataggaacaacaactattggagcagtgataacaataacagcaacaatgcctggagtaacaacagcaattttaacaacaataatgactggagtggtaacaattcctataacagcagtactgagaacggtaatagcagctacaacagtagtcatggttataactacaatggtacatggagcgacagcaaccacagtgcatggagcagtagcagcagcaacaataaccagagtggttcatttgttgataataacagtgtcactagcagccgcagttccatgaatgatgcaaatcacgtgagtcacagctcaggttatggaggaagctcaaacagaggttatactggaaagagcttggaaggatctgctgtaaaggatcctgatccactagacatgtccgaggaagctaaggctgagagatggtttaggagggcagctcagataaaggacatctctgagctagcgaacattccggacgaggacttccctgagataatgccgatgaggaagggggtaaacagattcgttgtgagcaagaggaagacaccattggagaggagattaacttccccacagtacagaaggaacctgccaattgtcagatctgaaacggacgaggatgctagctgaaaacagaggtatgattgcctgcataccagtacggcagtataccaccacagccttaactgtgatgcgattgcgatgtaccatttttatttgtgacgataagcgagcgatcggaaacagaaatcatggaaaacaataccccaagatagttttctgtatagtaaaattttgttcgcaagcctgaggtttgcgggattgtctttgctacttctaaactatacagatttgcgttgtactaaaaccctttttaacattcaacctccgttttttttat

SEQ ID NO: 329 - DNA, 2027 bp, Zea mays
agaaagaaatgtacagtctacacagctgaccagagagctagtgcaagcgatctagcaagttttaatcttggaagaagccagctaggcgcgtgaatatggatcgcctcactgtgatggcgccgccgctgctcgtcctcctcctgctgctcctctcgcggtgctcggcggcggcgtcacggcgcggcgggggctggtgggaggagggcgagggggagtggaggccgagcgaggaggaagagaagggcaaaggcaaagggagggggctgttcctgctgcaccgggtggagaaggtggtggagtcggagggcgggcaggtgcgcgtggtgcgcggccagccgtggccgccggcgtccttcgcctgccgcgaggggctcatgcacatcggcttcatcaccatggagcccaagacgctgttcgtgccgcagtacctcgactccagcatcactctcttcgtgcagcggggggaagcgaaggttgggtatattcacaaggacgagctcgtggagaggaagctcaagatgggcgacgtcctccacatcgacgccggctccaccttctacatggtcaaccccggcaaaggccagaggctgcagatcatatgcagcgtggacgcctccgatagccttggctttggacctccttatcaggccttcttcctcggcggcgcaggggacccggcgtcggtcattgccggttttgggccgaagacgcttacccgtgccttcaacgccacctacgacgagttggcgcgtatcctgttgccacgaaccggcggccccatcgtgtactacaccgcggacgcggagccagagagcggtgccgccgaagaggagcgcgggcaggtcgacgggcacgacggtgtgctggacaggggagcgcgacgcgagggcgccggcgcgtgggtgccgggtggcaggggagacggaggcgacgagtgcggcggcagcgatgacgcgcgtgaggcgacgtggtggtggacgaagctggttaacagggtcgtcggaggggcggctggcggcggcggcgctgcggaggcgaacaggaagggcaagaagaagaagggcggcgcgccggagccgtacaacctctacgacagcgagcccgggttccggaacgcgtacggctggaccgtctccgtcgacaagcaccagtacgagcccctcaagcacccggacatcggcgtctacctcgtgaacctcaccgcggtgcgcgccctgcctgaatcatatcgacctgcccgctttcttgttggattactttcgccgtttcgcgtcatggcagaggaggggttgctgctggggtcgatgctggcgccgcacgtgaaccctcgggcgacggagtacggcgtggtgctgggcggggaaggcacggtccaggtggtgttcccgaacgggtccctggcgatgagcgaggtggtgcgccccggcgacgtgttctggatcccgcgctacttccccttctgccaggtggcggcgcgggccgggcccttcgagttcttcggcttcaccacctcggcgcgccgcaaccggccgcagttcctggtcggcgcctcctcggtgctccgtaccatgctagggccggagatcgccgccgcgttcggcgctcgcgagaaggagttcagtaagctggtgcgtgcgcaacgggaggccctgattatgccgtcctctcctgggaaggaggaggaggagcatgggaagaaagggagggagaaagaggagtcactgccgatggttgtcgagcaggcggcggcggagtgagctgcttgatctttcagtcttggactcttggcttcctcagaagcgcgcgcgcgccaccggaaagtgtttctactcttgttactgcgccttgtcagtgatcgtgttgttggttttttttttcgtggcgccgtctataaataaaagtgctttgtgcgtttacagctatgaaatcaggattatcatccgtaactcgtaagctggacgccaatgctcccggccggataatagaagcagagatgatttacgtagaagcagaaatgatttacataa

SEQ ID NO: 330 - DNA, 1892 bp, Zea mays
aaacccaaaaaaacaattggcagcgcaaccgcccacagctcgtgacgaggcgacccaacccccccgtagcggcggcggcggcggcggcgagcaatcctccggtccggccggcggaaacactagcggcgggaggcagagcgtccaatggcggaggacgggggcaaggccgcggcggcgtctgcggccgcggcggaggcaggaggcggaggagccaaggagggcggcgaggagaggaccgtcaagctcttcgtgggccaggtgcccaagcacatggccgaggccgacctgctcgccttgttccgcgaggtagccgccgtcgacgaggtcaccgtcatcaaggacaaggccaccaaggtctcccgagggtgctgcttcgtcatatgcccctcaagggaggaagctgacaaggcggtgaatgcctaccacaacaagcaaacgctctctggggtatgcgagcatactactaaccttgttctggcatcaagtcctttgcaagtaaaatatgctgatggggagttggagaggcttgaacataagcttttcattggaatgcttccgaaaaatgttacagacactgagttgactgatttgttttccaaatatgggaatgtcacggatttgcaaattttgagaggttcacaacaaacaaacaaagctggctgtgccttcattaaatatcaaacaaaagatcaagcattggcagctattgaagctctaaacgggaagcacaaaatagagggttctagcgtgccattggttgtcaaatgggctgatacagaaaaggaaaggcaggctcggaaagcacaaaaagctcagtcacagctatctcatatacccaatgcaagtccaatgcagcagcactcttcagtatttggtgctttacagatgggatatatgcctcaatacaatggatttggttatcagccaccagggacatacggacttatgcagtaccctctatctcctatgcaaaatcaaggccccttccagaatatggttcaacctcttaaccaagggaactcgataagaggagtcaatcctgaagtgtctcccagttcagttcaaaggtcatttaatgcaatgcagctaggcagcccttatcctgctatgcctggtatgcagtatcctggatcatatcccggtggtcccatgggcaaccgtcatttgggaaattctcacaatccgattaaagctccaaattcgaatgccaattccactgtttcttctagtcccagcagcaatgctggtgggcaggttgaaggtcctcctggagccaacctatttatttatcatatcccacaagaatacggtgaccaggagctttccagcgccttccagagtttcggaagagtagtaagcgctaaggtgttcgtagataaagcaacgggcgtgagcaaatgcttcggttttgtgagctacgactctcctgcctccgcgcaggcagccatcaacaggatgaacggctaccagttaggcggtaaaaagctcaaggtacaactgaagagagaaaacaacaccaagcacagtagtaaaccgttttgacagacaaggcagcagccgtccggtacccggtacatattaattgaccatcaacacattgcagcagcagcctcagggcctggggagggaagagacccgtgtacccctctttgttcacttcaacattcttggagattcgtcagtcagctcagctcgtgtaattcattgcagcagacataggccgtagcagcagtttgtaccatgatcagatcacttgtacacatgattcattcaattgttactgacagccggctttcatcctagaataattcgctgtgacaaccttatcatttgctgacgaatgaagtcaggtagacttgttcatctatggaatgatggcaactttcgagcga

SEQ ID NO: 331 - DNA, 1298 bp, Zea mays
ggtcgccctaagggttttacacccaagtttagcttagccccccttgttgcacggttgtctgagcttcttggcattcaggtgcaaaaagccgacgatgttattggccctgaagttgagaagctggtggccgccttgcccaatggtggggttttgctccttgagaacgtaagattctacaaggaagaggagaagaatgacccagagtttgcgcagaagcttgcctccgtagcagatctttacgttaatgacgcgtttggaacagcccacagggcacatgcatcgactgagggagttacaaagttcttgaagccttctgttgcagggttccttttgcagaaggagcttgactaccttgtcggagctgtttcaagccctacacgcccatttgctgccatcgtgggtggttcaaaggtgtcatccaagatcggggttattgaatccttgttggagaagtgtgatatccttctcttgggtggtggtatgatcttcacattttacaaggcacaaggtctttctgtcggtgcttcgttggttgaggaagacaaactcgatcttgcaacatctctacttgcaaaggctaaggaaaagggtgtctcccttatgttgccaaccgatgttgtcatcgctgataagtttgctcctgatgctaacagccagattgttccagcatctgcaattcctgatggttggatggggctggatattggcccagattccattgctgcattcaacgcagccctggaaacaacccagactgtcatctggaacgggcccatgggtgtttttgaatatgacaagttcgctataggaactgaggctgtggcaaagaagttggcagaacttagccgcaagggtgtgacaactatcatcggaggtggagactctgtcgccgccgttgagaaggtcggagttgctgacgttatgagccacatttccaccggaggtggtgccagcttggaattgttggaaggaaaggagcttccaggagttactgcattggatgaagcagccactgtgactgtatgaagcaagttttcattttgtttcatcttcttttttggaagttaccgggggagggactcccacctgaataaggtgcgcaaggccaggattgttggctcaaccacagggagcgcacgccaccgcatcatcttcatgtaccattgtatacttgctacattcttgcttgctcctcctcagccgctcgaaatgtaggagatcaatgatttatagagctctggaaatcgtttgaacaaggagtaagcgacccaagtaatatgcttactgagtcatctttc

SEQ ID NO: 332 - DNA, 1413 bp, Zea mays
gtctcgtcttgtgcccttcttaatataaaccttgtgcccctctgctgcagcaagaaggaaagaagctagcgcttatagcttgtcagccatggccaccgccgccgcgtctagcctcctcaagtcctccttcgcgggctcccggctcccggccgccacgcggaccacaccggcgtccctcgtggtggccaccggcccgcgcggcgccggcgcggggcccatctgcgcgtccatgtccatgtcctcctccaacccgccctacgacctgacgtccttccggttcagccccatcaaggagtccatcgtgtcccgcgagatgacccgtcgctacatgacggacatgatcacctacgccgacaccgacgtcgtcatcgtgggcgccggctccgcggggctgtcctgcgcgtacgagctctccaaggaccccgccgtgagcatcgccatcgtggagcagtcggtgtcgccgggcggcggcgcgtggctgggcgggcagctgttctcggccatggtggtgcgcaagccggcgcacctgttcctggacgagctgggcgtggcgtacgacgaggccgaggactacgtggtcatcaagcacgccgcgctcttcacgtccacggtcatgagcctgctcctggcgcgccccaacgtgaagctgttcaacgccgtggccgtggaggacctcatcgtcaggggagggcgcgtcggcggcgtcgtcaccaactgggcgctcgtgtccatgaaccacgacacgcagtcctgcatggaccccaacgtcatggaggccaaggtcgtggtcagctcctgcggccacgacgggcccttcggcgccaccggcgtcaagaggctccaggacatcggcatgatcagcgccgtgccggggatgaaggcgctcgacatgaacaccgccgaggacgagatcgtgcgcctcacgcgcgaggtcgttcccggcatgatcgtcaccggaatggaggtcgccgagattgacggcgcccccaggatgggcccgacgtttggcgccatgatgatctccggccagaaggcggcgcacctggcgctcaaggccctgggcaggcccaacgccgtggacgggaccatgtcgccgccgttgcgcgaggagttgatgattgcgtacaaggacgacgaggtcgtggacgcctgagtgcggcaagcagagaggaggatcgacgccagcagcgtcttatcttaattgccttgttgttcaatgatgaatcgatcgaattcccttgggttagctttattattgttgttgttattattaatttgactcgctatagtgtgtcgtgttcatagcaccaccaccgcgccatcgacatgccacacctgtgctctgtctgtcacgtcacgtgcgagtcctactacgggaaaaaatgcatggtaatcgtggagttgcttctctgt

SEQ ID NO: 333 - DNA, 1011 bp, Zea mays
tttgtttccattccatcggtggcacgagacaggagacgccaaggccatagctagagcctagagcagcagcagaggcttgacctgaagctccacccgccatggcattcacgcccgctacggcctgctgcaaggcttccctggcgctggcaccgcgggcgtcgccccgcggcccggcggcctgcgcgcaggcggcgctcctctgcacgccctccacctccgtgttccgcggcctccgggcgcccgcatccgccgcgccggccccgcgccggcgccgctcggcggcgtccacgggcatagtctgcggcaaggtcgccaagggcagcgtgccgccgaacttcaccctcaaggaccagaacggcaagcccgtgtcgctgaacaagttcaagggcaagcccgtcgtggtttacttctaccccgccgacgagacgcccggatgcacaaagcaggcgtgcgcgttcagggactcgtacgagaagttcaagaaggccggggcggaggtgatcggcatcagcggcgacgacgcggcgtcgcacaaggcgttcgcgcagaagtaccggctgccgttcacgctgctgagcgacgaggggaaccgcgtgcgcaaggagtggggcgtcccctcggacctgttcgggacgctgccggggcgccagacgtacgtgctggacaagcagggcgtcgtgcagtacgtctacaacaaccagttccagcccgagaagcacatcggcgagacgctcaagatcctgcagaccctctgatccgatcaacctcctcactgttctgggccatgctctgcattcgtcgctgtaaaagtaccggactatgtagtagtgtagtgtatgtaaccaagagctgatgacctgatgttttgttccatccttcagtgagtctatctatcacacgattctggctcgtttgatcgaccagcatcttcctgtttgtcatggtcagtttcacttgtattacaactgtacttttggtcgacagtctcagatgttgtagctcgttcaaccc

SEQ ID NO: 334 - DNA, 1781 bp, Zea mays
gtggccgtccgccaccccgcgcggcgttgcgtgtgctctatctatccgccccgcgcgcttctccgccaaccaactccccggcgcctccctcctccaccagaccaccacccacaaacccttcttattgataccatccacagtcccagcccgcgccagcctctgcctctgccccccagactaccccctgcctgcaggctcctgcaactgcaatgtcggcgctcgggacgctctccggcggggccgccggtgtctccggcctcatccgcctccgccgtcgggtggcccccgcgctcgcggcgccgtcgcaccacgccgctgggacgttgaactgcgccgccttgcccgatgccgccccgctcgtctggggacgccagctccgcccgtcgctcctcctccccgccacactgctcccgtcgtcgtcgcagggcgccaggaggcacacgccacggcggcccgccgcagccgcaggcagggaggccaagtctgtgggtttcctggagaagtacccggccctggtcactggcttcttcttcttcatgtggtacttcctcaacgtcatattcaacatcctcaacaagaagatctacaactacttcccctatccatactttgtgtccttgatccatctagtagtgggtgtcgtatactgcctcatcagctggagtgtcggtctccccaagcgagcgcctatcaatggcacgctcctgaagcttctctttccagtcgccctgtgccatggtattggtcacatcactagcaatgtgtccttcgctgctgttgcagtctcatttgcccacactatcaaagctctggagcccttcttcagcgcagctgctactcagtttatccttggacagcaagttcccttctctctgtggctttctcttgcccctgttgtcatcggtgtttcaatggcatcccttactgagctctcattcaactggactggcttcatcaatgccatgatatcaaacatctcattcacctacaggagcatttattccaagaaagccatgactgacatggatagcaccaacgtgtatgcttacatttcaataattgctctcattgtttgcattccgcctgcagtgatctttgaagggccccggctaatgcagcatggattcagtgatgccattgcaaaagtaggcttgacaaagtttgttagtgacctattcttggttggactgttctaccatctgtacaaccagattgctacgaacaccttggagcgagtggctcctctgacacatgctgtgggcaatgtgttgaagcgtgtgtttgtcattggcttctcaatcgttgtttttggcaacaaaattagcacacaaactggaattggcacgtccattgccatagctggtgttgctatgtactcttacattaaggctaagattgaagaggagaaaaggaaaaagagcgcatgatgagctgactgctgtgaatattttaccttctgcgtctgggacacaacaacaacatcgtcgacaatcaagattatgccttgttttgtagtattcgtcttgagtcgctttgtttattaccaatctattatctggtgttgaacagcagcacattgcagaacagatgatcgtcgagtgaccttcatatacgcctgtaactctctctctctccctctctctcagctcagcagtttagatcgactatactcattggacatggacctatctatatatcttctttgtaaacaggacagagtcggactcctgctgcagtattatcaactcatctattttaaactctttaagttggatttattt

SEQ ID NO: 335 - DNA, 1665 bp, Zea mays
aataaactcccgcggtgccgtgcctcgctttcgcatccccccgcggagaggagaggaagaagaagaacccagccaaatcctcagtcttcaggctgctcacagctcgtgccgtccactctcccccgaggcagtctcttgcgttcgctgctcgacatggcgctccaggcggcgacgtcctttctcccctcggccctctccgcgcgcaaggaggggtcggtgaaggactcggcgtcgttcttgggtgttcgtctcgcggcggatggcctcaagctggacaccaccgctctgggcctacgcaccgtgagggtgagcaggtcggcggacatccgcgcgcagacggcagcggtgtcctccccgtcagtgacccccgcgtcgccgtctggcaagaagaccctccgcaagggcacggcggtcatcaccggcgcgtcgtccggcctcggcctcgccacggcgaaggccctcgcggagacaggcaagtggcacgtcatcatggcctgccgcgacttcctcaaggcgtcgcgcgcggccaaggcggccggcatggacaaggacagcttcaccgtcgtgcacctggacctcgcctccctggacagcgtccgccagttcgtcaggaacgtgcgccagctggagatgcccatcgacgtggtggtctgcaacgccgccgtgtaccagcccaccgccaaggagccgtcctacaccgccgacggcttcgagatgagcgtcggcgtcaaccacctcggccatttcctcctcgcccgcgagctcctcagcgacctccagtcctccgactacccctctaagcgcctcatcatcgtcggctccatcaccgggaacacgaacacgctggcggggaacgtgcccccgaaggcgaacctgggcgacctgcgcggcctcgccggcggcctcaacggcgttggcagctcggtgatgatcgacggcggggagttcgacggcgccaaggcatacaaggacagcaaggtgtgcaacatgctgacgatgcaggagttccaccgccggtaccacgaggagacgggcgtgaccttcgcgtcgctctacccgggctgcatcgccaccacgggcctgttccgcgagcacatcccgctgttccgcctgctcttcccgccgttccagaagtacatcaccaaggggtacgtctccgaggaggaggccgggaagcggctggcgcaggtggtgagcgaccccagcctgaccaagtccggcgtgtactggagctggaacaagaactccgcgtccttcgagaaccagctctctgaggaggccagcgacgccgacaaggccaagaagctctgggagatcagcgagaagctcgtcggcttggcgtgatgcccaccgtggccggcgccggcagccggcgacagtttttcctacctaggacatgctcattagttggtctcactctcagtcgagtagtcgacgtgtggtgcgcccgtgtcagagtgccaagccaagacagaaagtgagtacaaacgtgtaaaatatgtgctactgcgacgtgatggtttgggcagtggactgtatgtatctctactctctaggcttctgctttgctttgcatatttaattttctgctaataagaggacagcaaatgcctttcgagcttctttactttgtcggcatttagcagattcagatttttcttgagg

SEQ ID NO: 336 - DNA, 1026 bp, Zea mays
acacacagcctactgcgcacggtccagcagcgaaacacccagtgtccgctgctcggtcgaggcctgacgccacagattgccaggagcccgcccatctgaagcggcctcgcgctcggggcttcagagattgaccgaaccttctcaaaccaggcacgaattctgtcagtcaggggccgggatcgtctggcccgccagccccgactcgcgcggctccgggcctgcggcgctgccccggcccatccaaccacggatccaccgttcagataatatccttcgctgcctccggctgcgaggcagggaactgaggaaacgtctcgaatggtcgaacagtagtttgctcgctattatccatggcgacttctacggctgctgccactgcactgctccgccccaggccggcagttccagccaagttggcgcagaggaggtgcctccatgcggttgctgggtggacgacgatgaggaggaggggagctgcaggggtcgtgcgagctttcttcaaccctctcggggatgagcgcatcctccgagaagccatcaagtttgagtttcaatacccgtttagtcgtgtgtatgactgtatgcttgcaaagtttatccttgaaaaggagccagtagcattcatgggtggtgtgtttgctggcctcttgaggcttgacctgaatgaggatcctctcaaggaatggataagtcggacagtggaggcttctggaatagctgaggaaaacagctctgaagaatcaagtgaggcagatcaaaatgatgcacctcagcaaattgagattgagtgaggaatgtttggtactataagttactacgtacagtacatacacagttcctccaagagaccaagatacatctttgaccagactttggctgtggtaggtttaaggtactttccaagacaagtttctgtccatcattttcatgtgtccagtgtactaaaattcagcctaaactctgtggtgttgtatgttgaagtgtataagtttttttcttgaatacgcaggagagctgcgtattttt

SEQ ID NO: 337 - DNA, 4058 bp, Zea mays
aatcagattgtcaggaaaaaaaattgcattggagaaccgttagatttagaatgaacgtgggcaatgcagcctgcagtactgcagtcaatctggttccgctgctccttcctcggcaccgccgcctcgcaatccgctcccgcttcgcccgtaaaaccctagctaaaccctagccgaaagaaacaatgtctctcctcccctgagcgcgctcgtggccgccccttgttggccatggctctccagctccgccgcctcctcccgcacggatacgcccagcgacaccgcgccgtcatccacgcgctatcgctgctgccgccgccgcccgcaatgcttcaattcgaggtgtttcagagatattcttcttcaccctggcccttttcacctttccgcccttgtaaaatgtgtggggttgcatttaggagcaattcaacaaggaaaatatcttcaagaaataattttggggttgccttacagcccaaaagtagtgcctttattactcctcggctctttggcagctatagttctgtatgtttcagagccacagccagctgtggaattgctttaaaggctaataatattggcaattcacgaccattctcaactacatacagtaaaaaaataaggtttcttgttaaaaataagatttcattcagtaatctaaatatgagaaggaaagacggaagtgttgcacatagtttgcttcatagatctgagaaatgccaaagcacattagctacatgtagcaccattgttgatgaggcttcaacatctactagtaacaacagcaagagtgttactgatgctaagactgacactgccaagaggaagagttcaagaggaagcaaaaaggaagttgatggagatatgaaagaaaaggaagtacataccaataaaaagaggatatttgctagaactcgtaaagctgcaacaaagacgtctgataatattagcacgaaccaagaaaacaagaagactgataattgtaaattgaaaaggggtgctgatagtttcaaagagaaaaaagtaaataatagggcaaagtcaaaagcagaggtttctgctgcttcttctgtacctgaaatttgtatgcaatcctctattgatggttcagttattgagaaaaagccactggtgccattgtatcctcccagagccaaatcagttgtggttgtggaatcagccacaaaagcaaaagttattcagaagtaccttggggacatgtatgaagtgttaccaagctatggtcatgtgagagatttagcaggtagatctaaatctgtccgccccgatgatgacttcagcatggtctgggaggtgcctgctgctgcctggacacaccttaagagcattaaagttgcactgcaaagagcagaaaatttaattcttgcatctgatcctgaccgtgaaggtgaagcgattgcttggcacatcaaagaaatgcttgaacaacaaggtgtactgggttttgatgtgactgttgcaagagttgttttccatgaaatatctgaggatgcaataaagaaggctttaatgtccccgaggtatattgacatggacttagtcaatgcttatcttgcacgccgttcccttgattatctaattgggtttggcatatcaccacttctgtggaggaagttgcctggttgccaatcagctggacgggtccaatctgctgctttggcccttgtgtgcgatcgagaagctgaaatagaacagtttaaggcacatgagtactggacagtacagacagacttcaaaatacaatcagcagatccttcaaatgccacatgtattccattctgtataaagcatttgaattcaaaaaagctggatcaactttccataccctctcaagaagaagcgcaagctatagaaaagatgattcattcttctacatttgaagttttaggtgttaaaagaagtaaaattcacaagaatcctccattgccatatattacatccagccttcagcaggatgcagcaaacaaactccattttactgcaggatataccatgaagattgcccaaaacctttatgagggtatcaacctttcctcagaagaaacaactgggttaataacgtacataagaactgatgggttccatatttctgatggagctgtggaggacattcgttcactagttaaagaaagatatggtcagaagtacgtttcggaggacattaggaagtatttaaagaaggtgaaaaatgctcaagaagcccatgaagccattaggcccaccagtataaggaggccgccatcatcattggttggaatacttgatgatgattctctaaaactgtacactctaatatggaaaaggacaatggcttgccaaatggaagcttccagaactgagatgattcaagtggatgttggcattcctgaaggagagatgaattttcattccactgcatcaaaactggacttcaagggataccgagctgtctatgaggatgatcaggccagtccatgcattgacagctctgagggagattgtgtgcatgagtgtaactttgaggccttgtcgaaattaatggttaaggacttggtgtttcctgttaacgtgcatcttggccagcacttcactaaaccaccaccacgatattctgagggtgcattgattaaaaagctagaagaacttggaattggaaggccatctacttatgcatctataatgaaagtgttactggatcggaagtacgtgacagcaaaaagtcgagttctacaccctgagttccgtggtcgaatggtctcggcattccttttgcaccatttctctgaggtttctgattacaactttacagctaacatggagacagagctagataatgtctctgctgggtcaactgaatggaagggtcttctgaaagactactgggaacgattcagcaaatattgtgcagatgtgagtaaactggatggcagaaaggtagagagaatgcttgaagaaaaatttggtcctatcctcttttccgatgtttacaaggattgtagaatttgccctagttgttctgaaggaaccttgagattcaaagttagtaggtacggtgaaggctattttgtaggttgtgatcgacatccaaaatgcaagtacattgctcgctcactgtcacagcaagaagatgaaactgaacccatagaagaaaatgcaaaatcttttgaacccaggttacttggtgtcatgcctgattctgatcaaaaggtgtttttgaaacaagggccatatggctactatgttcaagttggagaggacaaaaaaggtctgtttccaaaaagggtttccctttccaaggtcaaagatatagactctgttactctagaagatgcaattgagcttttgcaatatcccaaaatcctgggaaaacatcctgaagatgataatcttgtacttataacacattctaaggttggatacaacatcaagcacaggagatttattgctcaagtgccaaagaacatggacccaaagaagatgacacttgagcgtgcactcaagcttctgagtagtaaaagtgtcagacggattggtcgtctaaaggggaaggtcgaaaagaaggaacccattgaatggcattagctgagcctgcctgcactcgtgtgtgcaaaaaaaaaaaaaaaattcagagagaagtcaacattcatagcatgcagaggttcagcctttcgtgtgtttaactgcttatgatgagagcggagaagggggccccatgtgtgacaaagaacaagtgccaagggaatgcacaaccagacatattcgggtcatatctttgatttcatatttttcctttagtcatcaacatcataagctgcattgaacgcgcggacacagaataccagactataaaattctgagcttaacaaagatgagagggtggtttcatcacctattttacataatcgctgcatttcctaattactttcacattttgtactagagataaatgcatcttttaccacaggaaacccattttagttgtgaccgtcgtgtaggttatgtactcatgtgtaagaattgtatatgctacttcacagctgaaattccatctgttttgcact

SEQ ID NO: 338 - DNA, 783 bp, Zea mays
atggatgagcacggggaaaaggaagagaacaagtctcaagattcggctttggcggcggagcagcgcgaggagacggcggcggcggagggagaggacacgtctgaggaatccacggaccagcgcgaggacgggcacgggtataaagcggacgaatcggcgggcctgctgcccgaggacgacgtgggctctggagaagcctcggcggcgccacacttcgggcacccgtgctcgttgttgcgcgcctgcgccggattcctgggcctgcacggctgcggcggcgatcagaagccggcggcggctgccgttgctgcatctgcagctgaagccgccacggcggcggcggcgagctcgtcccaggatgaagaagacggcggcgtcgacatggcgaaggctaacggtttctacatgcatgaggtgatcacccgcgtatgggcggtcgcggtgaggaggccgcggccgcggccgccggatcacgcgagagaagggagcggtggcaatggaggcgtacaccactaggagtagactcgccgcgcatggttgtctaccttggctcgctcatagcctccgcctacataaatattttgcccgtcagagatctgcggccgtctactgtctacatgcacctttaaataaatccatggctatgaagcatgaatgtctgatgtaattcatgtaggcttctccgatgcggacttcaaataagacaaagtagttgtttctgatgtttgagacgttaattaagctgcagcacccaagggcttacgcttgcgttgatgcatgaag

SEQ ID NO: 339 - DNA, 2083 bp, Zea mays
gctgctctggtctttcccaccaccgcgaacacctggcaatggcggcccccgccccgtcggccacctcccagatgtcctcaagcggcctcctttcttactgagctcacccaccacccgccacgcccccgactcccacgaactcctccgcctacccacccctaccctacttctctcgcccgccggacgcatctcggggctctgctccccggttctcggggccggtggatgcgaccgcgtccccgcccccgaaatcagctgcccggcgtcctcatagcgttcccgggatctaggccctgagcaatggcagcggcggtggcgccgccgctctgcacctggctcgtcgccgcctgtctctccgcggcctgcggcgatggcgagaaggagaatgaacgcaggcaccgcggtggcggcgtagggggtttcttcggctcgcgccgccgcctcggctcagggcgccgcggcgtggggcgctctggaatggccatgtctgttgccttgcatcctgaaaggacagctgtggaaaataagaaacctgatatgaaacagaggagagtggttgtcactggcatgggtgtagtgacgccactagggcatgatcctgatgaattctacaataaccttttaaggggtatcagtggaataagcgagatagaggcatttgattgttctcactatcccacgagaatcgcgggagaaatcaaatcattttcgacagatggttgggttgcaccaaagctagctaagcgaatggacaagtttatgcaatatttgataacagctggaaagaaagcattggagaatgctggaatcactgaagaagtcatgaatgagttggaaaaatcaagatgtggagtcctcattgggtctgctatgggtggcatgaaggttttcagtgatgcaattgaagctttgagggtttcatacaagaagatgaacccattctgtgtaccttttgcaactacaaacatgggttctgcgattcttgctatggatctgggttggatgggcccaaattactctatctctactgcttgtgctactagcaacttctgcattctgaatgcagctaatcatatcagaaaaggggaagctgatgttatgctttgtggtggttctgatgcaccaatcatccctattggattgggaggttttgtggcctgcagagctctttcacagagaaacagtgatccagcaaaagcttctcgaccttgggatgtggatcgtgatggatttgttatgggagaagggtctggtgtgcttgttttggaagaacttgagcatgcaaagcaaagaggtgcagaaatatatgctgaatttctaggaggaagtttcacatgcgatgcataccatatgacagaacctcatcctgaagggaaaggggttattctttgtattgaaaacgcattagcagattcaggagtaacaaaggaggacattaactatataaatgcccatgcaacatctacacagatgggtgatttgaaagaatttgaagctctcaaccgttgttttggccagaatcctcagctacgagtgaactcaacaaagtcgatgacaggccatctgctaggagctgctggtggaatagaggctgttgctgctatacaagctataaggacaggttgggtgcatccaaatctcaatttggacaatccagagaaaaccgtggatgtcaggatgctggtgggcccgcagaaggagagatgtgatgtgaaggtggcgctgtcgaactcgtttggatttggcgggcacaactcatcgattttgtttgcaccattcaagtgatagccgttgacaaatttcttgtggtgggctacacaccgtcgaactgagaccttgtataagaaagtatttaccggacgcagcaatatctcctgtactgcaagattaggaagagatccaaaaggcttagtaggatgtgtattgccccacaaccggacgaaagatggaaactggtccgaaattatgtcgaccgagaagggcatccgttcagatgcccccccccccctttacgtgttatattttctttcagatgcaagtgtaccctatatataattaaacaattaatatcatcatcattaac

SEQ ID NO: 340 - DNA, 2013 bp, Zea mays
acctgtcgttgctctccgccgccaccagtgcccgtagcgctcgccgccgccgccgccgccgccaccaatggagagcctccggctcgccgtcacccaccgaccggctctccctctcccgacctcccatagccacctccgccgccgccatctgcacctccacctccactcttaccccaatcccctctccctctcaccccccatcgcctcccacctctcacctatccctcgccgccacctgcccccgctcctcgcctccgcatcggcctctcaagcgagctctaagccggcggcgtcggcggcatctggcggtgctaaaccgctgcccctctttctctcgcttgccgccggcctcgccgtccgcttcctcgtgccgcggccggccgaggtaaccccagaggcctggcagctcctctccatcttcctctccaccatcgcggggctcgtcctcggcccgctccccgtcggtgcgtgggcgttccttggcctcacagccaccgtcgccacccgcacgctccccttcaccgccgcgttcggggcgttcactaacgaagtcatctggctcatcgtcatatccttcttcttcgcgcgcggctttgtcaaaaccggactcggcgaccgcgtcgccacgtacttcgtcaaatggctggggcgcagcactttgggcctatcctatgggcttgccatcagcgaggctctcatctcccctgccatgcccagcaccacggccagggctggaggtgttttccttcccatcgtcaagtcgctatcgctctcgtccggaagcaagcccaacgatccatcggcgaagaaactcggctcttatcttgtgcaatcgcagttacaggcagctgcgaactccagtgctctcttcttgacagcagctgcacagaacctgttgtgtctgaagttagcagaggagattggtgttagtatcggaaacccatggattacttggttcaaggtttctagcgtgccagcagttcttgggcttttagtgactccttatttgatttacaaaatattcccccctgaaataaaggacactcctgaagccccagcattagctgccgagaagctaaagaacatgggtccagtaacaaaaaatgaatgggtcatgattgggacgatgcttcttgcagtctcactatggatttttggggaaactattggcgtatccagcgttgttgctgcaatgattggactctcaatacttcttgtgcttggagtgctaaactgggaggattgtttgaatgagaagtctgcatgggacaccctagcttggtttgctattttagttggtttggctgggcagcttactaaccttgggattgtgtcctggatgtcgaattgtgttgccaaggttcttcaatctttctcattgagctggcctgcagcatttgttgtccttcaggcctcgtacttctttattcactatatatttgcaagccaaactgcacatgttggagctttatactcagcatttcttgcgatgcatttagcagctggtgtgccagctctaatgtcggcacttgctttggcatacaatgcaaacctctttggagcactaacacactatagtagcgggcaatctgcagtatactttggagcggggtatgttgaccttccggatgtattcaagctgggttttataacagccgcaatcaatgctgtaatttggggagttgctggtgcattatggtggaaatttttgggtctttattgagtgtcggggcagtgtaagtacgtgaaaatcgtaccatattatcaaacaagtaattcatgatccagcatcggaggtggccaggtgggttcgtttttcttccgagggcctatgaatgcatcataacagaggaacgctcatctttagaagtttttgagcattatcatcaacctagaaagcagatatgttttcgtaggttcttaaatcgacggtcgttatatatcctttgatttgattgttgtaccctcgtatctcctccccaaggtaaataaaatgcatgagggacttttgaa

SEQ ID NO: 341 - DNA, 1208 bp, Zea mays
gcaccttacaagagagaagtcggcccaagtagcgtgcgcgcagaagctactcccgaagagtcgctctcctgcgtccacgcctcgcttgcggcgactagggcgactgccgccgccgcccttcgcccagctgcccaggtcttcgtcgggcgctttaccggtgaagagcgcccaccataccaggccccgcaccttttaacaagttccagtcgtggcgccgagccctactcctcctcccgccgccgccgccgccgccgcagactcttcctcgcgactcgccgctcgcccgactttccgagctccgacaccaaggaacaccatgggagagtcgagcaaggagctcctggacctgccctccgaccccaggcctcccgcctccttcatcgagtcgcttctcgctggcagggagcagcagcagcaggataaggagggaaagcgtaagttgggggcgtccactgatcccctgcccaaaagccaaggtactgttgaactagctcttcagcttgtacaagtgtctgatcagaaacgcgttatcgggaaagtgaaggatttcttgggggagattgcaagggccaaccagaagttgcagcttgatgcacagaacaagcctcctgtggagtacgatattgaagcccttactgggaacgaggaggaatacattgagatggatctgcttctaggtgtcgctgatcttcattcagagcaggctgtggaggcagctgaagcaacaataaacggacgccagacttcagaaatgtcatttgcttgcagctcatctgactcggaagatgatagtgatgacagcgatgaagatgctgatgacaaacctctcacgtctgacaaagataataaatgtaaaagtcctgatgatgcggagatgggtccagcgaaaggaaagaagcccaataaaagacagaaaattgttgttctcaactagtacccttgtcttctgtacacctaagaacaagggctggagcgcaagtggtgaatgtgttggcctggtattatcagaagttacggagggactctctctgttcttttttatttgtcacggtttagtttaaaaatgaacaggggacaaatattcgagaagggaggttgtatttttttcagtgttgtgcaatgttcaggccagctagggcaacgtgcacgggggctaaaagaagtaatgcatattccagtttatacaatgcgttccaatgttctggcct

SEQ ID NO: 342 - DNA, 971 bp, Zea mays
acaggacgacccaagcaagcaagcaagcagcgagtacatacatactaggcagccaggcagccatggcgcccaccgtgatgatggcctcgtcggccaccgccgtcgctccgttccaggggctcaagtccaccgccagcctccccgtcgcccgccgctcctccagaagcctcggcaacgtcagcaacggcggaaggatccggtgcatgcaggtgtggccggcctacggcaacaagaagttcgagacgctgtcgtacctgccgccgctgtcgacggacgacctgctgaagcaggtggactacctgctgcgcaacggctggataccctgcctcgagttcagcaaggtcggcttcgtgtaccgcgagaactccacctccccgtgctactacgacggccgctactggaccatgtggaagctgcccatgttcggctgcaacgacgccacccaggtgtacaaggagctgcaggaggccatcaaatcctacccggacgccttccaccgcgtcatcggcttcgacaacatcaagcagacgcagtgcgtcagcttcatcgcctacaagcccccgggcagcgactagaccgcgcccgccggccgccccccgccggctagctagctagctagctcctgcgtgagctagtagctagtgccatgcgtcgtctctgtcgttcggttttgcttcgggtcaccgtgtaccctttgcttgcttggtttcttctttccttttttcctttttttttcttcttttccccggccatggttcctttgctttccagcagttctctgctggatgtgatgtatccattgttgcaatcatggccttgcattggctacctctatacctgctacaaaactactgcaacgcctatatatacttggggtgaggaacatgtgaatgcaagctccggctatcatatacatgtaatatggatacaaactatatatataaatccgccgaggcgccgacaatactata

SEQ ID NO: 343 - DNA, 2154 bp, Zea mays
ccgttctataaagggcgtcgagaggaaaccggtggaaccctacactgagaaccgcagagacaggcgtcttcgtactcgcctatctccgcgactcaaagctttccccaattcccccccttctcccatttctcaccaccgccgccgctccccccgttcaacaacaccatgagggagtgcatctcgatccacatcggccaggctggtatccaggtcggaaacgcgtgctgggagctgtactgcctcgagcatggcattcaggctgatggccagatgcccggtgacaagaccattgggggaggtgatgatgctttcaacaccttcttcagtgagactggcgctgggaagcacgtcccccgtgctgtttttgttgaccttgagcccactgtcatcgatgaggtgaggactggcacctaccgccagctcttccatcctgagcagctcatcagtggcaaggaggatgcagccaacaacttcgctcgtggtcactacaccattggcaaggagattgttgacctgtgccttgaccgcatcaggaagcttgcagataattgcactggtctccagggcttcctcgtcttcaacgctgttggtggaggaacgggctctgggcttggttctctcctcctggagcgcctgtctgttgactatggcaagaagtccaagctcggtttcaccgtgtacccatccccccaggtgtccacatccgtggttgagccatacaacagtgtcctgtccacccactctctcctcgagcacactgatgttgctgtcctgctcgacaatgaggccatctatgacatctgccgccgctcccttgacattgagcgcccaacctacaccaacctcaacaggcttgtctcccaggtcatctcatccctgacggcttccctgaggttcgatggtgctctgaacgttgatgtgaacgagttccagaccaacctggtgccctacccgaggatccacttcatgctttcgtcctacgctccagtcatttctgctgagaaggcctaccacgagcagctgtccgtggctgaaatcaccaacagcgccttcgagccatcctccatgatggccaagtgcgacccccgccatggcaagtacatggcatgctgcctcatgtaccgtggtgatgtggttcccaaggacgtgaacgctgctgtggccacaatcaagaccaagcgcaccatccagttcgtggactggtgcccgactggcttcaagtgcggaatcaactaccagcctcccagcgtcgtcccaggcggtgatctggccaaggtgcagcgtgccgtgtgtatgatctccaactccaccagtgttgtggaggtcttctcccgcattgaccacaagttcgacctcatgtacgccaagcgcgccttcgtgcactggtacgtcggtgagggtatggaggagggcgagttctccgaggctcgtgaggatctggcggcgcttgagaaggactacgaggaggtcggtgctgagtttgacgagggtgaggacggcgacgagggtgacgagtactagacgctctactggcgcggcgtcgtcgggcttgtgtgccactgctatcctgtgatctgccctgagtggctcctatcgtgttatgtttctgtcggttcttatctatctgtcgttgtgtggtttacaacttacgttgtaagactttattcccccgctttgctactgggttattaagtttggcgttattgttttcttgatctctgagatgctttgctttcaccacctgttttttttttgtcatctgtgtaattgagtcgacggacaatcattttcttgcttcgagcaggcgagagcagcacacgagttgcagacagatcttactgtggcagcacagtgcacacttcaccctccggttccgcttctgttttgtgtccggttactctgcggcgcaaagcgagcgctggtggtgtggcgcgtcgtcgggctgccacgcagaccgctatggtgcagtggcggtctcgcggccgaaacccatttgttgtacctcaatgcttacttacgccttatgaaggcctcatcgaggctttggtgtttctcgttctgggaactgtacagggaaaaaatcagggcctctttgcaacacaggatttgtacaaatatgaaataactaggtatgtgcccgtgcgttgcgacggc

SEQ ID NO: 344 - DNA, 909 bp, Zea mays
tatactggtattatatataacagtataacacacatcactagtaatgtgtccttcgctgctgttgcagtctcatttgctcacactatcaaagctctggagcccttcttcagcgcagctgctactcagtttatccttggacagcaagttcccttctctctgtggctttctcttgcccctgtggtccttggtgtttcaatggcatcccttactgagctttcattcaactggactggcttcatcaatgccatgatatcaaacatctcattcacttacatgagcatttattccaagaaagctatgtttgaagggccccagctaatgcagcatggatttagtgatgccattgcaaaagtaggtttgacaaagtttgtcagtgacctattcttggttggactgttctaccatctgtataatcagattgctacaaacaccttggagcgagtggctcctctgacacatgctgtcgggaatgtgttgaaacgtgtttttgccatcggtttctcaatcattgtttttggcaacaaaattagcacacaaactggaattggcacgtccattgccatagctggtgttgctatgtactcttacattaaggctaagattgaagaggagaaaaggaaaaagagcgcatgactgctgtgaataatattatcgggaccttcctcggacacaacatcgtcgacaatcacgacctacttctataccttgttttgttttcatcttgagtcagtcggtccattgtttgttcccagtctggtgattaaaagtctgcaaattctgtttgtggaattggcagcgatacaaatttggcttctttaagtaaatccggttgccggtacacagcggtattaattcacctgtaactgaatgtaataccgtaatgcaaagggcacaacactctgcctgact

SEQ ID NO: 345 - DNA, 1594 bp, Zea mays
atgaagtcagagagacagtcggcagggttcgggttcgggtccggacccgaagattgcgaccagacttgcgttcgagctcggagctcctccctctatccacttgcaacggtcgagaggaagcggaggtccatatcgctcattcccgcccgtcccgcaaccaccaccgcggccgcggtgccatggcatccgccgccggcgccgccttgtgcccatgctctttctccaccgtactctcctcctccccctcaactcccttccgtcccgcaaggacgacgcctcgcccttctctccgcccgctgccgcgccgcgccaggctaccgctgcggccgggccactcggtgcctcccgaaatgcgactcggggaagccggacggaggaggagatgctgggttatcgggtcggaaggcggcccggccagcgggtcagggaggacccaggcggcccgcacagttcggcgcgtcgtcgtgcggactcgcattcacgacggtggcgggggtgataatgctccaggcatcgcagcaggcgcttgccgccacgcagttcgctggcctgcagcctgcggacgtgctgggggatctcggggacgtcagtacaggttttgcttcagctttcctgttgatcttcttttctgagctaggggacagaacgttcttcattgcggcactgttagcagctagaagttctggagctgtcatttttctaggcacatttggagctcttgcggtaatgaccattatatctgtagttcttggtcgagcattccactatgttgatggcatcattccgttcagctttggtggtactgatttcccagttgatgacattgctgcggcatgtctcttggtttattatggggttactacattacttgatgcagcctcaggtgatgatgaaaagatcaatgaggagcaagaggaggctgagttagcagtatcgaaattttctggaaatggtgcgggggtcatgtctgctgctggtactattgctagcacattcgtattggtttttgttgctgaatggggtgataaatcatttttctccacaattgcactagcagcagcttcatcccctctgggtgtcattgcgggatcactagctggtcatgccattgcaacattgattgcagttcttggtggctctttgctgggaacattcctgtctgaaaagattatagcatacattggagggagcctattcttggcctttgctgcgattaccatagttgagatagtgacttgaaaagggagttccagcttccacaattcataaaaagtactgatcttttgtcagggcaatgaaaaatcagcttgatcgtaatggtagtacattgatgtgttaccgaacatgattgtccacaggaacttcattgttcgtatgggacgtcctaggcttgcgtagagtgttttgtttctggtgatgagaatttctgcttctttatccaagaacaatgtttttgtcatcatcatgatttgtagtggaaacactgatagtcaggttggtcggaagatgggactgggagcaaaactatgaattccatgtagcttttgaacttcctcttacattatttacaagtatatgaatcagccttttcgta

SEQ ID NO: 346 - DNA, 1020 bp, Zea mays
ccagtgcgagctgaagcatccaggctctggaatcatcgtcgggatgtctgtgccagcatcagcccaggtgcctcacaccatacgatctgctgggagctgctgcttcaggtcgtcgcatcaactatctgcgcagaatctgggccgacatcgcaggtggcgggggaccggaaagaagaagatcctttccacccgtggcgtgcttgagtccagaaacggcgcacatcctggtggccttatgaagagaaggaaggtcgtggagcacatcatcctgctcagagccaagcccaacatctcagacgctgaagagaaagacatgctggactacctatacacatcgcagtaccagatgcgagggatactcgcggtctcgctaggccgcatcgaggaccccaacagcgacaacttcacgcacgctgtgttcatgcgtttccagcagaagcaagacatcgcggagttccagagtaacgcgtactactccaaagttgtcgacgagcacgtaaagcccgtttcctatggctcggtttctgtagatttcgagtccgaggtggaagacgacattatacctctctttcgcaggggagaggattttaactacggcgtcgagtttatgctgctggtgtctttcttgaagactgcgtctagagaggcaacggaggacgcattagcgtctcttgacaagttgatcagccaatgcagcgcttctattgtgcaggcaacatgtggctgctgtttggatcgtccggataacgggtacagtcatgctgcagtaatccgtttcccatcatctgatgagttgaagctgttcagggagagcgaggagtacaaggatatgtgggcgtccaagttccgcccgatcgtggagagatccctgcacctgcacttcaccgttgaccccgtggggaaccagctgatgtagaccaaccgagtggtcatccctatacatgggaccaagagcatctgtactgtacagtgtaaaacagagagatggggtaatatagaggataccgatagggtcaacaa

SEQ ID NO: 347 - DNA, 893 bp, Zea mays
catttcaggcttggccgaacctcgggataaatccttgcgtctgtgtgctctgttctgtattgtatcctgactctctgtcttactcgtctttatatctgcacttcaatacttatctgtggtataagctttatttgaagtgcaggacattttgagacaggatcttctattccgctgcaacctacttgaggagtcttctcactccactgcgtactaagtcttcgagtagagtaagaatttaacagcagttcatgcagcgtaaaaaccaagctaaaatacatcacagtacctggaggttggaaaagaacgaagggatccccaaatcaggagagatcaattgataaccgggcgtaaggccaccacccgaagcagcttgcaacgaaccagcaggaatcagctcggtgccatcaacagagcccaacactcggtcagcagggacgctgccctctaaagtgactccctggtccaaggtttgggctaccaccatacagccggagtgaggaggcgatcccgcatgaacgtccactgggcagtggcttacacttcccacccgaaccaagtcatccccggtgacatcctcgggggctgggcatgtgtcaacaccaccctgggggtccaggttctctgcggtagccacttctaaggctgatgggccctcagttacttccatgggaccagaacgatccaattcagtctcccgaccctcgagatcgcgctccaaggtcgacgaggcacgggatgacctcaacccagcatcaagcacatcagcacaaacctccatcacaccatcatccactagctccgataacaaatcctctggaaccatatcctcaagagtctgatcaaaattggccagggacagttcttgcaggccaatgagagcagacaaagcagga

SEQ ID NO: 348 - DNA, 971 bp, Zea mays; identical to SEQ ID NO: 342

SEQ ID NO: 349 - DNA, 1590 bp, Zea mays
ctctccctcctctactgcacctgcaccacagtagctagcgctccattcgaccccacccacagccatggctgccgtgaccgcggcggccgtctctctgccctcctcctcctcctcccctgccgccgccaaggccaaggcgtccgcgtccgcgtccccgtcgtctccatgcggccacctccagttcccgcggcggcacggcggcccgcgcgcggtgcggctgcgcgtgcaggtgtccaccaccgagaccgcggaggcggagccggtcaagaagctggagaaggtgtccaagaagcaggaggaggggctcgtcaccaacaagtacaagcccaaggagccgtacgtcgggaggtgcctgctcaacaccaggatcaccggcgaccaagcgcccggggagacgtggcacatggtcttcagcacagaaggcgaggtcccctacagagagggccagtccatcggcgtcatcgcggatggcgaggacaagaacggcaagccgcacaagctcaggctctactccatcgccagcagcgccctcggagatttcggcgactccaagacggtgtcgctgtgcgtgaagaggctggtctacaccaacgatcagggggaggtcgtcaaaggagtctgctcgaacttcctctgtgacttgaagccaggcgctgaggtgaagatcacagggccagtgggcaaggagatgctcatgcccaaagaccccaacgcaacaatcatcatgctcgcaacgggtaccggcatcgctccgttccgctccttcttgtggaagatgttcttcgaggagcacgaggactacaagtacaccgggctggcgtggctgttcctgggcgtcccgaccagcgacaccctgctgtacaaggaggagctggagaagatgaaggagatggcgccggacaacttccggctggacttcgcggtgagccgggagcagacgaacgcggccggggagaagatgtacatccagacgcgcatggcggagtacaaggaggagctgtgggagctgctcaagaaggacaacacctacgtctacatgtgcgggctcaagggcatggagaagggcatcgacgacatcatgctcgacctcgcagccaaggacgggatcaactggttggactacaagaagcagctcaagaagagcgagcaatggaacgtcgaatacaccgggctggcgtggctgttcctgggcgtcccgaccagcgacaccctgctgtacaaggaggagctggagaagatgaaggagatggcgccggacaacttccggctggacttcgcggtgagccgggagcagacgaacgcggccggggagaagatgtacatccagacgcgcatggcggagtacaaggaggagctgtgggagctgctcaagaaggacaacacctacgtctacatgtgcgggctcaagggcatggagaagggcatcgacgacatcatgctcgacctcgcagccaaggacgggatcaactggttggactacaagaagcagctcaagaagagcgagcaatggaacgtcgaagtctactgatgatgatccttcatttgtacgtagtattgcggagatcaatcgaatcgtttggctcgtcgtcg

SEQ ID NO: 350 - DNA, 1092 bp, Zea mays
aagagataaggctcctcttggcaacaaaacagccggttggcgtgccgcgtgcacgcctggacgacgatgcagctccagcatggccctcggcctggagtggccggtgctgctcgtccccgcagtagtctcccccgccgacctagcctcccgcgccgccgccgcagcagcagcagcacgaccaggacgacgaggacggcgctggtggtgctagtagccgcggcgacaagagacggggccagaaagacgacggcgtcggccagcagggccacggcggcggacgtggtgaggcagttctacgacggggtgaaccggcgggacctggcggcggtggagccgctcatcgcggagggctgcgtgtacgaggacctggtgttcccgcgccccttcgttgggcgggagcgtgtggtcggcttcttcggcgagttcatggggaccatcagccccgacctgcagttcgtcatcgacgacatctccgccgaggactccgccgccgtcggggtcacctggcacctggagtggagggggaggccgtttcccttcagcaggggatgcagcttctaccgcttgctcggctcgggctcggactcggacgcggattcggactcggagcagcagcggctgcagattgtgtatggtcgagactgcgtggagccggccgccaagcccggggatttggcactggtaatcatcaggggagtgacatggatcctcgaacgatttccgagccttgcaagcaggctctgatgaccccaggtccccaaccgaggcaatagctacaggatacgctacgcatggctttgctctcgaaagtccagtgagatcgagctagcagacgtgtataatgttctacaattaatacattattctaagaaactggccaaacgtatgtctcgtcgtgacgaaaagaaaaataaaaatataggcccaattacttttattaaataggagtgtatagttctgcacctaagtaagagcttgttactatacaaaaactgactattagtaagatgagatgtatagtttacagtcggtctaccggctaaaccattaaccttgctctaattttatatatatgcaaacataaatgtatag

SEQ ID NO: 351 - DNA, 1221 bp, Zea mays
gcaacagacccccgcccacgaccacacgcagcaagcagcagccgcgcgctcgcctaggactaccgactacgagtagtgctcagctagcctccatcctcagcgcgcgagtggctgctgcgcattcctctctttatccgtctctgtgcttgtttaatttgtgttcgttcgtgagtaggcggccggcacatatggcagcgcagtccatgctcatgtcgaccagcgtcaacggcggccgcgcgctgccgtctcttcaggccgtccggccggctccatacccgcggctaccgctgccgtcgtcgtcgtcctcgtcagctggctacaggcactccaagtccgtctccgtgaagacgctcgccctgttcggcaaatccaaggtcaagaccgcgccggcgaagaaggctgctgcgcccaagcccaagccgaaggttgaggatggtatcttcggcacgtccggcgggatcggtttcaccaaggagaacgagctgttcgtcggccgcgttgccatgcttggctttgccgcatcgctacttggagaggccattaccgggaagggcatccttgcgcagctgaacctggagacgggcatccccatctacgaggcggagcccctcctcctgttcttcatcctcttcaccctccttggcgccatcggcgctctcggagaccgcggccgcttcgtcgacgaggaggtcaccggcctcgacaaggccgtcatccaacccggcaagggcttccgcggcgccctcggcctcagcgagggagggccgctgttcgggttcaccaagtcgaacgagctgttcgtggggcggatggcgcagctgggcgtggccttctccatcatcggcgagatcatcacggggaagggcgcgctggcgcagctcaacatcgagacgggggtgcccatcaacgagatagagccgctcgtcatcttcaacgtcctcttcttcttcatcgccgccatcaaccccggcaatggcaggttcatcatcggcgaggaagaggaataggctgctggctgctgctgctggcctcggacatgagtcgtgtgcgtttacttttacctgtgactgtgcgtctcggtgcgcgcgcgtaagtgctttgctgtgtatcaattactcgtgatgagacctcgaaggtagggtgtcgcgttgggttgtctgcttgtagaaacaagagcttatatataaattactactagctaatatgccatggttgcaacga

SEQ ID NO: 352 - DNA, 778 bp, Zea mays
attacgcccttggctcgtacgtacttactcactctccccccacccgcgccaggccagacagactaactgagcacccgctgcaaggagtccgcgcccatggcgagcaccaacatggcgtcggccacctcgcggttcatgctggccgcgggcgtgcccaccggcagcagcggcggccgcgtcaacttcgcctcggcgcccaaccggcttggcaggaggctcgtggcccgggccgacaacgaggccgccgcagctgaggcggcggaaggggagggtgccgtggccaccaagcccaaggccgagaagccgccgccgatcgggcccaagaggggcgccaaggtgaagatccttaggagggagtcctactggtacaacgggatcggcaacgtcgtcaccgtcgatcaggatcccaacacccgctacccggtggttgtgcggttcaacaaggtgaactacgccggcgtgtccaccaacaactacgccttggacgaggtctcagaggtgaaatgagtggggccggccggctcaagggctccgcgctagctaccgtgtgattgatttgtagtagttgtgaaatgaggctgtgaagctgcatgctgtgctggctagcgtcacaacatcgatcctatgtgtaatagcataatccacataatcatatcatgtaattgcttgctttattcaccgtgtactcaataatctctcttgctctctaaaattgttgtattgttatatgtggttttgtacatgcacataaatcgctctctgccaccactgtttgcgc

SEQ ID NO: 353 - DNA, 555 bp, Zea mays
atgccgcctccgtccaccgccgcggcagtctcctccattatccgcccgacgccgcctccggccgtatccttccaccccgtacccctcccgcagatcaggcggcgctcatcagctggcgccgcagccgcttcccggctcgccgtggcgcgcgccgccgcctcgggggcgcgcggcggcggcgacgccgagacggtgttcttcgacggcggcgcgcactacggcgacctggcggcgaacctgctcctggggctgaccctgctgtggctgccgctgacgctggcggccgtgtcccgcgcgttcatcctgcggtaccgcttcacctcccggcgcgtgacggtggtctcggggctctccggcgccgaccgcaccgacttcccctactcgtccgtcacgtccgtggtggtcgtgccgcggttcgtgggcgagtggggcgacatcgtcatcacgctcagggacggcaccaaggtcgacctcaggagcgtgcccaggttccgcgaggtcgccgactactgccgctccatggccgccgctgagggctccctcgtcgtcagctag

SEQ ID NO: 354 - DNA, 866 bp, Zea mays
ggcccttggctcatgccatggacgagaacgacgagccagggtagcactcgccttatccacccgtcctgttcctgaacaccgtcacacacgggtactagtagtactaccatatcatgtgacgtgcatgcggctgtgatgcacaccaacccagccatggccaaggcagctcctcctctcctcgccgccggcagccgcactgccatcacagcgcagcagccatcgtcgaggaaaggcgccgctggcaccggtttgttctgcagtcgcgccatcgtcagcaagcgcaccagggtaacagcgaagctcggagacggagagctgaagcctgcaggcaagcggaagttcatcaccaaggaagaggagccagaacagtactggcagaccgcgggggagagggagggggagaaccccatgatgacacccctgccctacatcatcatcttcggcatgtccacccccttcgtcatcctcgccatcgccttcgccaatggctggatcaaggtccctgtgcgatgaccgtaacgcgatcagccagcctggatcatagatgctgactcgtcagcctgcatctcatccagcgtgtgtcctgcgactttgtaccttcatatatagagacaagagttcttgcgtgtgagcataattgcatgatcgcgtggtgtatgtaacccgaaactgtttaccttttcgcaacaacttcaatcttcactcttcaggctgtgttccgattcagtgccctggtatcaatcttcagttattcgcacaagagaagatttgtaccatctgcagttgtagaatcataacagccagaaccacaacttggttttttggtagacctcacaataggtcctgctacaatcaccccccccccc

SEQ ID NO: 355 - DNA, 1626 bp, Zea mays
ctcccgtggccagccagacaaacaaatctctcgcgcctcccactcctccccgccactcgccgccagcgaccaaccatcgcccgcccagcagcagcacggtcccacgccaggactcgacccacgcgcggctagctaagctcccgccgccatgatcacggccctgcaggtctccggcggcggcctgccgctcctgttcgcccggcgccggcgccgggcgttccggccgccccaagcggtggcgtccgacgccgccgccgccgccgagggcacggcgagggaggatggcgggaaggtggccctgggcgggtccggcgtagccgtcaccaagctcggcgtcggggcgtggtcctggggcgacaccacctactggaacgagttccggtgggacgatacgaagctgaaggcagccaaaggagcgtttgacgcgagcatcgactgcggaataaccttcttcgacaccgccgaagtgtacggagcaggggtaagaataagagcatggaagcttgacgacgccttacgcccttaccttaccaccacccgtcacaaggtgaatctaacgctgcttccaaacgtgttctgccgccatcaggtatcgggagcgattaattcagagagtttactaggaaggtttatcaaggagaggcagcggaaggagcaggtggacgtggctgtcgcgaccaagttcgcagctcttccatggaggttcggtcgtgggagcgtcatctgcgcgctcaaggcctcgctggatcgccttggcgtctcttcggttgagctctaccaactccattggccagggatatggggcaacgaagactacctggacggccttggagacgctgtggagcaagggcttgtgaaggcagtcggggtctcaaactacagcgagaaacgtctccgagacgcgtacgagcgcctcaggaagaggggggtcccgctcgcctccaaccaggtgaactacagcctgatataccggaacccggaggagaacggggtgaaggcggcctgcgacgagctcggcgtcactctgatcgcgtactccccgatcgcccaaggtgctctgacgggaaagtacacgccggagagtcctcctaaaggccctcgaggacggatatacacgccggagttcctgacgaagctccagccacttatcaaccggatcaaggagatcggaggaagctacgggaggacttcaacccaggtggtgctgaactggctggtgtgccagggcaacgtggtgccgatcccgggcgccaagaacgccgagcaggcgcgggagttcgctggcgctctcgggtggagcctggcgcccgacgaggtggaggagctccggtccatggcgcgccaggtcaagcccgtcatcggcttcccagtggagaagctgtgaccacccccatggcactggtatatatcaggtgtatagtaggactgtaggtacgtagatgggcaaagcataccatttccatcgcgagactgcggacgatgtatgctacattgctactgaacgtagcgtcacgccgtcgaccagatcacagtagctgtctgtgctaaggacgcgtttgactacttgcgaaaatcatgggtttacatgaaaaaaacataaaaagataatgtttttatccacaacaa

SEQ ID NO: 356 - DNA, 638 bp, Zea mays
ccaacgtcacggcgctgcggagctccataaaaacaaatgcatcgcccccatccccatcatcggatcggttggtttatgcaccagcgcccagcggtttctcgaggtgcgtgcgtgcgtgcgtgagagagaggcgacttcccggaggtttagcatcttcttctctctctctcagtctcaccctgtccctcgcaaaagcatctccatccttcgctcctctcttcccgcactgttctcggaatcgctcttctcctccgcgctgttcttggaatcgaaaggtgggaagcgcaatgagcaacgagtttttccttgctatgtttgcgcagaaaatccgcacggtcgaggtggagggcaagaccgtaaagctgcagatttgggacacagcagggcaggagcggttcaggaccatcacgagcagctactacagaggagctcacgggataattattgtttatgacatcacggacatggagagcttcaacaacgtgaagcagtggcttgacgagatcgaccgatacgccaacgacagcgtgcgcaagcttcttgttggtaacaaatgtgatctggccgagaacagggctgtcgatacttcagtagcacaggtcaaaaaacttccaagtagctgttcatcaatactgtag

SEQ ID NO: 357 - DNA, 3438 bp, Zea mays
gacgcgacgcgacgcaggcccacccctgtgaccctgtcctgcagaaatattcattatcttatattcaaataaataaaataaaaaccgactgaatttgcttatttccggctcttgttgaaaccgccacccgattcctccgctcgccaaatcctcgccgtgccctcgtagcaattccttgcgtcggcgcatcatcgcggcctcctctccctctctctctctatctctctcaatctctccgttggcaaatcgttgaatcgacgtgcttggccccggccgctctgagcccgccgccagcctcctcgtctgaagaagaacgacagccgtcgggctccggtggtcccgccgaagaacggcaggtagccagccgcgctcatcacgccggcgactcgattggcattgtattggcctttccgtttgttgtcagatcgaaaagaagaggaaagaatcgggaagcccgcccccctggtggatatgcgaggccatgtttttcatgtcacacccccgaccgattcgcctcgatttcgttcttctgttcttctgcgccgcaatggctccttcgctcgttcatatctgttattctgttgtgaatactcggtttgagtcaatgatgcgatttctttcattcaaaatcttctgggtgctcctgtgttattctgatttattcgctctgtttcgacgccagttaatctatcgtgtcggctgttgacaatatctttggtttcttgtccgcgacagagttctcgaagcaaaacgacctgatgagattcctcaaggggagcaaggtggaggtattgcaggaggcagatgtgccgtttggttcttggaggcctggtgagatcgtctccggcaatggacacgcctactttgtgagatatgatgaaagtcccgttgactccagcgtggctgttgaaagggtgccaagaaggttgatgaggcctcgccctcctgcggatgatcctgtacgctggagtttgggtagtatcattgaggcctttgacagctactcgtggaaggttgccgaggtggtgagagtgcttggaaagaatcaatatctagtcaggctccttgggtcctcgctggagttgagtgcacatgcatcggttcttcgaatgaggaagctttggctagatgacatatggattgtgactcagaagtattctgcaagatgcttggatggtggtgcattccgaggtcaatcaaaagataaaaatttagaccataacttcagaatggacagtcgtcaacttgagaaccagaatgcctttgagggtgatacatctagaggcatcaagagaaaatcgtctgctatatcaacacatcctcaatgcagtgaaatcactaagagattgcggacaccaaatagagatggaaggtactcaaagctggttgatagaagtttttcccctttggctgaaaaggtagatgatgttgattccccatgcattattctacgcgggaaatgcatccatgctggtcataaatggcatactggaacaactgaagaatttagtgatacagagagtatatcatcttctgttggcagttctagtcctaacagtacccctcatagatcacaacattataatttggtctaccaaagtggagatagctgtagtagaactgatgatgatgaagcttctacatctgaaagagaaacatcagaacatgataacaatgggtcgagggaagaaacccatgtgctggaattacatgcttatcgcgcaacaatgttagccttgcatgcttgtgggtcaattagctgggagcaagaggctttgttgactaacctaaggttaacactgaacatctcaattgatgaacatctagctgaattgaggagtttggttacccgtgctgttacttccagatagcttttgttgttactttcctggtggcatttcatatctttcaaattattggccaaggttggaggcttgtaaagcatccttccataggttcttgtaaatggaggagtctgccacatgttttgcagtgcgataaatgtggcaacatttccaatgaacttccattggtcaagctgggtcaagactggttccagattaatactggttgctggataaaatggtcaaattagattggtttatcatccaaagacaaaaaggtgatctgcttgttgtgtgatttttcacagaacaagcatatttcttctatgatggcatgcacccgtttgactgtccagaagagcacttgagggaacatctgtatcagcaccggagtgtttcctctttccagcaccggagtgtttccaccatcgtcattagaggtaggaccctcccacaacctagaagcaagaccctcgcacgcccgatctgaggatgacttcgagggatatgacgattgacttctcgagtcagacgatgaacttacatttgatgcgcaacctgaaggcccggctaactggaactgggtggctgagctacaataggaggttcaaactgagctgcctgctgaactaagtatgattcaagacgaaaaccactctaagtatgacctctcggatgaggacgtctccgtggaagggacggacgcgtccgatgatgatattttggcagataatcaggacccggctgatgaggatattgaagatatcgagccgaaagaagatgagaaagattcagaggagctcattgttatcgatgatgagccatgggcgccagatccatttattcctgttgttcctaatccgaagactcgagcaccggagattcctgtaccagaagcccctgcgccagtagctcttgcttcagagggtcccccacaaggaaatacaatgcctgagctcgtcccgcaaccggattgggtaaggacaaaatctcacaatcatcaactcaggtgtggctgaagacaatattcgtatggagactactcaaatataccgctgccctgaacactgactgagcatgacgctgccttgattgaactcgaggaattaaagaagcagaatgcccaactgtgactcatctggagaatgaaggacaacctcaggctgccgtgaaacttagattttcctgacttgcagccgacttctatgtagacacaaaattgttgggattacatagtttggccttgcatcaaggaaaagttgcaggttatctgtacagtaatttgccagtcgtcttatgcatatgatgcatacctttttactgttctagtgttttgtaatccagatattgtagccggtgttcttggtgaaatatgcgccaggagagactgagacttattttgccaccttactttgtgcaaagccagctgcccttcaactttgctggacaggcaatcacatattttcagaagtgaagcggtaggccccggtagttctgatgagcaagcaagtgaaaagtttgtatgtggtgtatgacgatgtaccttggatctctttacttccaattgaacctgcacatgttcctggcttcgtgt

SEQ ID NO: 358 - DNA, 1168 bp, Zea mays
cccgttgccacacatacggatccaacaaaatctcccgcaaagacaacggcgagccaaccaccaccagcgtcccgcgctagctgcggcaccgcatggctgccgtgaccagcaccgcctccatctgcccggccgcagccggcgccctctcttcgctgccgtccttcatcacgcgcaagcccaccagcggcagcaggaggttgcagcaggcagcagcgacgacagtctgccactgccgctctgctcgggtagaggaggggctgctgggccggagggacgccttattgctcggcatcgtcttctccgccgcgacgccgccgctgctcgcccctgccggcgctctggcggacgaggccaccgccgagtcgcaggagggcttcactacgtacgaggatgaggccaacaagttcagcattcaagttccgcaaggctggctggtcggcgccggcgaggccagcggcatcaagtctgtcacggcgttctaccccgagcaggccgccaccgactccaatgtcagcgtcgccatcaccgggatcgggccggacttcaccagcctcaagtccttcggcgacgtcgatgccttcgccgagggtctggtgaacggcctggacaggagctggcagaggccgccggggctcgccgccaagctcatcgactccagggcggcaaacggcctgtactacctggagtacacgctgcagaaccccggcgagcgacggcgccacatcgtctcggccatcgggatggccttcaacggctggtacaaccgcctctacactgtgacgggccagtacatcgacgacgatgactcggagaagtacaggcctcagatagagaaggctgttggatcgttcaggctgacatgaaagatgcgatgtcatccagcaccagcagcagcagccgcccacggtacataaaccctaaatatgtatgcggagaggtccagcaacatgttgtgcccgaaaattgacaccttgccatttcgatgagacaagacaaggcatgtgcctattgccctattccaattcttgagcactgtaacactgccaatatgcagagtatatgttttctgcctgttgaggtggatacaaatgcatgctttttttttattaataactcatgtgtaacactgctgccttttttattctcttttcaaggcaaatgccctctc

SEQ ID NO: 359 - DNA, 1234 bp, Zea mays
catatccagaaccgagagagcttcctgccccagcacgctcaaaagacaagagcaagcacggaacacccatccccgactgtagtttgcccggcaagcaaacatctccggcagccatggcgtccactgtaacagccgccaatagcagccatggaagcgccctgcgtacccgtaccgcctccccaaggccggtcgcgggctggagctgcagacgcacgctttccacgcctgcacaccaccaccacgcgcggccgtcacccagagctcgggttgtcgccgtccgagccgccggcactcagcgggcgacctggttgcccggactggacccgcccccatacctcgacggcacactaccaggtgacttcggcttcgaccctctgggcctcggcgaggagcccgaagccttgaagtggtacgttcaggccgagctcgtgcactgccggttcgccatggcaggggtcgccggcatccttttcactgacttgctccgcgtatcagggaacagcgacctccccgtgtggttcgaagcaggcgcggcgaaattcgacttcgcgaacaccacggcgctcttcttcgtccagctcttcttgatggggttcgctgaaaccaagaggtacatggacttcaaaaatccaggatcgcaagcagaggaagggacattcatagggttagaggctgcactcgcaggtcaacagccaggctaccccgggggtccactgttcaatccactaggactcgcaaaggatatagagaatgctcatgacgagaagctcaaagaaatcaagaacgggaggttggcaatggtagccatgcttggcttcatggtgcaagcatccgtaactcatgccggccccatcgacaatctcttgacacacctttcggacccgttcaacaaaaatatcattcacacattctcctcttcctaagtactcgtcccaatgcccggatgctatggcacaaaaaggtcacaatgtttttgaacacaacagaacaacatgattattgatttacgtccttctccccaccgaataggggaaggaaggttagggaagcgttcaatcaattcaatgagatagtgtaatctatagcaaactcagatacgctatgatgtgagatgaagcgtacttcgtgcaatcaataagttccatttattcatatggacaacaaagttcctctctgatcattttgaaacaacaattcatattaatgaaatatatcaaagatttgtgtcgttata

SEQ ID NO: 360 - DNA, 2005 bp, Zea mays
cgccaatccgataaaaagcgcgcaccggcgtggcgcgcttcgcccccaggagccccgatcatctcccgctcccttccttcctcctcctcctcctcatggctctgtcgtccgccggctcgttcgtggcctgcagcctccggccaagcggagctagcatccatgccccgaggtcgccgccgcacctgaagccgggtgctgcggcggcgtcgttcacgaggacgccgcagcgccgggcgaacgcgaccaagggcggcgtgtccaccgtgtgcgagccgctgggccccgacaggccgatctggttccccggcagctcccctccgccgtggctcgacggaagccttccaggagactttggatttgaccctctcggactaggttcggagccggagctgctgcggtggttcgcgcaggcggagctgatgcacgggcggtgggcgatgctggcggcggcgggcatcctggtcccggacctgctggcgcggtggggcttcatcgacgcggggttctcgtggttcgacgccgggtcccgcgagtacttcgcggacccctggacgctgttcgtgtcgcagatggcgctgatggggtgggcggaggggcggcggtgggcggactacctgaggcccgggtgcgtggacatcgagccgcgcttcccgaaccgcaagaacccggtgcccgacgtggggtaccccggggggctgtggttcgactgggccaactggggccgcgggtccccggagcccgtgatggtgctgcgcaccaaggagatcaagaacgggcggctcgccatgctcgccttcgtcggcttctggttccaggccgtgtacacgggccagggccccatcgacaacctgctcgcgcacctcgccgaccccggccactgcaacatcttctcggcgttcacgtcccactgatccgatcttgcttcggagctggcggagagactgcgaaggattaaaaaaaagggcatcctgttgagggagaaagaacttcgcttggtcggtatcattttggccttgctggacatgtcaacattttgtttgtagtacctgcgtagaaatgtcaaaccacctgtacaaacgtacaaataccaccccagggatcgcgatgatgctagccagcagtccagcacacactagcttgtcctgaagatccatgcaacaccgtatacagaggaaatttatggacacggcaatgtaaacatcccccatatcctcgtcgtagcataacggtgtcatctacaatacaaatcctttatttattttacacgatatactgcggacaacattagcggtgttaaggtgattgggttgctaaaattagagggtgttgcttgaggattaaagctagtttgggagtcaaaaaaaccgaagcagatatgagggactagaatctacacattcaattttgtacatgcagccagtaaacaggagtattgacgacagtggacttgttccgttgttcgtagtatcgatgacgtcgattcctagctagcaaccaatctccgtgtggacaagtcacaagtggacactgaggctatccgcaaccgttacccctaaatttttccccctatatcactttttccccctatttttccctctattttttcatctcccgcagcggttccccctaaatactccccctataccccactaccactataaaatatcattttctataccaactgttgaatgcaattttgttgctgatgcagggacgtctgtagccaaaagtttaatacgcatctgcaggagaaagaaaagaaagaaaaagaaattatcatccagagaatacgtgggaaataagcaggaatacataaccaagatatttgccaggccatcatgcaaatccttggagttggcggccacaaagataggagtttgttgtaatcttttcctattatttagaataagttagttttatatccagttagagacgggatatataagcactattgtaagctgcaaagacgagagatcaacagttatcattttctttaatctactac

SEQ ID NO: 361 - DNA, 1775 bp, Zea mays
cacgagcgttggccgttgggctcttcgcatatccaccacccacccataaggcatcagcgccgctgccgacttcatcttttgcgttccccgtggcgggttggcaggccacttcatccgcctcgtcggcttcattcatcaccaggaatttccatcgccgcgcccggcgtctcctccactcgcctcccctactctatagcattccatttctgagctcgctaactgcgtttcttcggctcgccggtgagccacggattgggttcggcgggaggccgggaaacgggaatttatttcaccagtatgcaacagatggccatgccatcgttcgccgtaacctcacctccgtcgcatggcactaccttatgggcgcctcatgctcgtcgtcctcaaagactgcacaagagacacgtgcgcagccaagtccgggcagtggcacaagcacagctgcagtaccagaagctgggggactcagacctcctcatcagtgaggtcactcttggaacgatgacttttggcgagcaaaacacggagaaggaagcacatgacattatcgcttattctttcgatcaaggtgtcaatatcctagacacagcggaaatttacccagttccaatgaacaaggaaactcaagggagaactgatctttatattggcaggtggatgcaatcaaaaccacgagacaagataattttggccaccaaagttgccggttattcagagcggtctacatttcttcgagacaatgcaaaagtggttcgtgttgatgctgccaatatcaaagaaagtattgaaaagagtcttaaacgcttgtctacagattacattgatttgcttcagatacactggccagataggtatgtggcactatttggtgagtttagttataatccgaccaaatggaggccaagcatcccttttgaagaacaattgaaggctttacaggagttagttgacgaaggaaaggttcgctatatcggtgtttcaaacgagacctcatacggagtaatggagtttgtacatgctgcaaaggctcaaggccttccaaagatcgtgagcatccagaacagttacagtctacttgtgagatgccgctttgaagttgatcttgttgaagtttgccacccgaataactgcaacgttggactgcttgcatactccccgttggctggtggggttctcactgggaagtatcttgacgctaacgctgacatctcaaagagcaggctaaatctcttccctggatacatggcacgctacaatgactctttggctaaagaagcgacattagagtacgttaagcttgccaagaagcacgggctaactccagtccagcttgcccttggcttcgtgcgtgatcgtccattcaccgctagctccatcattggagcgaccaccatggagcaggtgaaggagaacatcgacgcgtttaccagcactccacggcctctaccacaggaagttcttgacggcattgaggatcttttcaagagatacaaagatccagcaatcctctagtttttcattcaccttttttggcgaaaagtagcaatcctcggacaatacaaagcccagaaaacatattacaacctatgatcgtatggtcataccattttgttcatgctgatacaattattgctttgttcttgtattggctctacaggcaataccagcagagcagaattatgttttctttccttcactgtgtaagtagaatgcaggttttcactgtgtaagcgttcttttatactctgctagtaactgtatgatgtcttcgacat

SEQ ID NO: 362 - DNA, 2623 bp, Zea mays
cgcccacagccttggatgcctgtcacctgcagcatatatagatccagcctccagccctccacgccatctgcatgcagagttgagaggcaaagaaagaaaaagaaaacaaacatgactcaagctcattcaaagtcatgcttccaacaattttgggatggagttcaagttaagaggaacagtggcagcttcaccatcgagctcctgccatctcttggcgcaacaataaaccaatctaacaagctgcggaagttcatcatatctccctacgatccctgctacagatactgggagctgttcctcatagtcctggtcatttactccgcctggatctgcccgtttgaactagcgtttttgcgggacttgccctctaagcttctgctagctgagaacatcgtcaatggcttcttcgcggttgatattgttttgacgttcttcgtagcttatgtcgacagcaaaacacatcttcttgtggatgaccagaagagaattgcagtaaggtacctatcaacctggttcatctttgatgtatgttcaacagctccatttcaaccaatcagccttctcttcacacgtaaggggaacggccttgcttttaagatactcaacatgttgaggctatggcgtcttcaccgagtcagctcgctgtttgcaagcaggctggagaaggacataaggttcaactatttctggactaggtgctcaaagcttatttctgttactctgttcgcggtgcactgtgcggggtgcttcaactacatgattgccgacagatatcctgatccagagaaaacgtggataggtgctgtaatgcctaccttcagatcggagagtttatgggctagatatgtaactgccctttactggtcgattacaacactaacaacgacaggttatggggatctacatgctgagaacccaagagagatgctgtttgatatctgctacatgctgtttaatctgggcctgacagcctatcttattggtaatatgaccaacctggttgttcatgggaccagccgcacccggagttttagggactcaatccaatcggcatcggaatttgcatcacgaaatcagttgcctgataagataaagcagcaaatgttgtctcacttctgcctacagttcaagacagaggggctcagccagcaagctatgctaaattgtctcccaaaaggaattcgttcaggcatagcatacaacctattctttacaatcatacgaaaagcctacctctttcatggggtatctaatagtttcattgcagaactggtaatggaagtacaggctgagtatttcccaccaatggaagacataatgttgcaaaatgaggcggcagcagatatttacataatagtttcaggagtagcgaatttgataacaacagcaaatggtaatgaacaggtgtacgaaaaagttgaagagggagacatgttcggagaggttggtgctctgtgtgacataccccagccatttacttgccgcaccactaccctatcacagctcttgagaataaggaagataagactgacagagatcatgcaagaacacaaggaagacagcaagattctaatgaacaatctatttcagaagctaaagctgcatgagagtttaccagaattaaaacaactagatcgaagattcatgcacaagtacgagctattccatgctcctcaagaagcatggttgttacctcagccttacctgcagtacacagagcacaaattggaagacattggtaagaagatcccaacattttgtggagatcatggttcaacaaaactagcagctgaaacaaaccagatgaggttgacacaacaaggaaacagccatgaccatggcaattatatggcgacggatgggatggcaggcgaagaaggcgaacgcaatgaggttcacataaattgtgaaaccaaagaagtctccattcatataaattctgaagattgtgacgcagcaagccattggcaaacagaccatgaaacggtgaggctggggtcttcccacaatacatccgatggcataactatgagagaaaaccaagatagcagtaacataaaatcatccaacaaaagggtcacaattcacacatatcctcgtaatgcagcaggttctttagtacagaacgggaagcttatcaacctgcctggttcactggacgagatcttcgaaattggatgccagaagtttccgggtctccgccctacaaaactattcagtggagactatgctgagatagatgacattagtgttatacgagatggtgaccacctattccttcttcagatgtaaaaccagaataacattgaattaacctaacgtaacaatagaggattcaagtcctccaatctggcaaaagcagcagattgtaaatcgagatatgcatgtggagatatgaagaggaataccgttttacaaattgttctgatcatttctgacattgtataaatatctgttcttgcataagctgctatctcatgcaaaagttatgcgaggcggtttcctgtttttttttcttttatttgataaaacaatagaatctccacaaaataactaaataaaggtgagacaataaaaacaccagtaatggggaattaaccactaatgcagtatcatggcataa

SEQ ID NO: 363 - DNA, 4279 bp, Zea mays
atgtcgtcgtctctagtgtccaccccatttgccgccgcggcgcagaagcgcctcctggcggcgcccgtgccgctgcactcgttcctcctgagcggccggcgccagcctccgcgccgcgccggcaccatccggtgcgcggtcgccggcggcaacggcctcttcacgcagaccaagcccgaggtgcggcgcgtggtgccctccgacccgcggggcctgccgcgggtcaaggtcgtctacgtcgtgctggaggcgcagtaccagtcgtccgtaaccgccgccgtgcagcagctcaacgccgacccgcgccgcgccgccgcgttcgaggtcgtgggctacctcgtcgaggagctccgcgacgaggacacctacgccaccttctgcgccgacctcgccgacgccaacgtcttcatcggctccctcatcttcgtcgaggagctggccctcaaggtcaaggccgccgtcgagaaggagcgcgaccgcatggacgccgtcctcgtcttcccctcaatgcccgaggtcatgcgcctcaacaagctcggctccttcagcatgtcgcagctggggcagtccaagagccccttcttccagctcttcaagcgcaacaaggccaactccagcaacttcgccgacagcatgctcaagctcgtccgcacgctgcccaaggtgctcaagtacctgccctctgacaaggcgcaggacgcccggctctacatcctcagcctccagttctggctcggtggctcgccggacaacctccagaacttcctcaagatgatcgccggctcctacgtgcctgccctcaagggcgccggcatcaagtacgacgaccccgttctctacctcgactccggcatctggcacccgctggcgcccaccatgtacgaggacgtcaaggagtacctcaactggtacggcacgcgccgggacgccaacgacaggctcaaggaccccaaggcgcccatcatcggcctcgtcctgcagaggagccacattgtcaccggcgacgacgggcactacgtcgccgtcatcatggagctcgaggccaagggcgccaaggtcatacccatcttcgccggcggcctcgacttctccgggcccacacagcgctacctggtcgacccgattaccggcaagacgttcgtgaacgccgtggtgtctctcaccgggttcgcgctcgtcggggggccggcgaggcaggaccatcccaaggccattgccgcgctgcagaagctcgacgtgccgtacattgtcgcgctcccgctcgtgttccagaccacggaggagtggctcaacagcaccttggggcttcacccaattcaggtggcgctgcaggtcgcgctgccggagctcgacgggaagtcacatgcattgcacaagagagtggagcagctctgcactagagccatcagatgggcagaactgaagaggaaaactaaggaggagaagagactggcgatcactgttttcagtttcccacctgacaagggcaacgtcgggactgcagcatatctgaacgtgttcagctccatttactctgtgctctcagacctcaagaaggacggctacaacgtggagggtcttccggacacacctgaagccctcatcgaggaggtgatccatgacaaggaagctcagttcaacagccccaacctgaatgttgcttaccgcatgaatgtgagggagtaccagtcgctgacctcctacgcctccttgctggaggagaactgggggaagccacctgggcacctcaactctgatggcgagaacctcctcgtctacgggaagcagtacggcaatgtcttcatcggggtgcagcccacctttgggtacgaaggtgatcccatgcggcttctcttctcaaagtctgccagccctcaccatggatttgcagcatactacacctttgtcgagaagatcttccaggccgatgctgttctgcactttggaacacacgggtccctcgagttcatgcctggcaagcaggttgggatgagtgacgcctgcttccctgacagcctcattggcaacatccccaacatctactactatgctgcaaacaacccatcagaggccacggtggccaagcgccggagctacgcgaacaccatcagctacctgaccccaccggccgagaacgccggcctctacaaggggctcaagcagctgtcagagctcatctcttcctaccagtctctcaaggacaccgggcgtggtcctcagattgtgagctccatcgtcagcactgcaaagcagtgcaacctcgacaaggatgtcccgctgcccgaggaaggggaggagctcccaccaaaggagcgtgaccttgtcgttgggaaggtgtacgccaagatcatggagatagagtcacggctccttccctgcggtctgcatgtcatcggcgagccgccgagtgccatcgaggcggtggccacgctggtgaacatagctgccctcgaccgccccgaggacggcataacctcgctgcccggcatacttgccgccacagtgggcagggacattgaagatgtgtacaggggaagtgacaagggcatactggctgacgtcgagcttctgaggcagatcactgaggcttcgcgcggcgccatcaccgccttcgttgagaagaccacaaacagcaaagggcaagtcgtcaatgttgccaacaacctcagcaagatacttggtttcggcctgtcggaaccatgggtgcagtacctgtccgcgaccaagttcgtcagagcggacagagagaagatgagggttctgtttgggttcttgggggagtgcctgaggctcgtcgtgcaagacaacgagctgggaagcttgaagcttgccctcgagggaagctacgtcgagcctggacctggcggcgacccgatccgtaacccgaaggtgctcccgacagggaagaacatccacgctctcgatccgcaggccatcccaaccacggctgccttgaagagcgccaagatcgtcgtggaccgtctcctggagaggcagaaggctgacaatggcggcaagtaccctgagacggtcgcacttgtcctgtggggcaccgataacatcaagacctatggtgagtcactagcccaggtgctgtggatgattggagttcggccagttgccgacaccttcggccgtgtcaaccgtgtggagcctgtcagccttgaggagcttggacgcccgaggatcgatgtcgtcgtcaattgctcgggtgttttcagagatcttttcatcaaccagatgaacctgctggacagggcagtgaagatggtggccgaactggacgagccagcagagatgaactacgtgcgcaagcacgcccaggagcaggcggaggagctcggcgtgtcgctaagggaggcggcgacaagggtgttctcgaacgcatcaggctcctactcgtccaacgtgaacctggcggtggagaacgcgtcatggaccgacgagaagcagctccaggacatgtacctgagccgcaagtccttcgcgttcgacagcgacgcccctggggcaggcatgaaggagaagcgcaaggcgttcgagctcgccctggcgacggcggacgccacgttccagaacctcgactcgtcggagatctcgctgacggacgtgagccactacttcgactcggacccgaccaagctcgtgcaggggctgcgcaaggacgggcgggcgccgtcctcgtacatagccgacaccaccacggcgaacgcccaggtgaggacgctgtcggagacggtgcgcctcgacgcgaggaccaagctgctgaaccccaagtggtacgaggggatgatgaagagcgggtacgagggggtcagggagatcgagaagcggctcaccaacaccgtcgggtggagcgccacgtctgggcaggtcgacaactgggtctacgaggaggccaactccacgttcatcgaggacgaggcgatgaggaagaggctcatggacaccaaccccaattcgttcaggaagttggtgcagaccttcctggaagccagtggcagaggctactgggagacaacggaggagaacctggacaggctcagggagctctattcggaggttgaagacaagattgaggggattgacaggtaaattgatttgccagatcggtcggccgatcggttccagcattcaacccataacgagcttggaactcttctgcctcattgggactcttgtacaatgtctgggtgtgtgatttatatatataaaaagttgtaacatgtaatactggaggatacaatctttaacaaagagggtggcggttgttccattc

SEQ ID NO: 364 - DNA, 1604 bp, Zea mays
ggaaaacaacagctgatgccccccgcgaagatcccgatgctgtttcggtgatggatcgtcggcgtcgcaggcgaggcggcccacgcccacacgccacgagcccacgacggccgagggaagggagaagggaccgacccggcgcccgcggctgcggtcgttgggctcgggcgccgcgctaccaaccaaaccaaaccccgtaaccccaccccatcttcccaaaaaagcgacgaatcgcgcagcgcggaagggggaatcgctgcgatttcttgtggcccggcggctccagccccacggctgccgagcggataacgaacgactggcggcggctcgcgtcggccttcctcctctccttctctctcctcgcatcgcagtcgcagcaggcaacaaaccaaatcgcttaccgcccccgaagcgtctcggttcgcatagcagagctgctcttgcaacaagccaaacaacccagtggctgctagccgagacaggggatagattgagagaggcgcgcagatggcgacgccgtcgtcgtcgctttgctccagcttcgcctccctgcggaccgcctccatcggccacccccgtggcatcgcctcctccacgcccaggaaggcattccatgtaaaagctgtggaggtggcaggatgcgactggattcatgttgatgtcatggatgggcgctttgtgccaaacatcacaattggacccttggttgttgatgctctgcgtccagtgactgatcttccgttggatgtacatctgatgattgtggaacctgagcagcgagtccctgattttatcaaggcaggtgctgatattgttagtgtccactgtgaacagacatcgaccatccatttgcaccgaacagtcaatcagattaaaagtctaggagcaaaggcaggagttgttttgaatccagcgactccactcactgcaattgattacgttcttgatgttgttgacctggtgctgattatgtctgtgaatcctgggtttggtggccagagctttatcgagagtcaagtaaagaaaattgcagaactgagaaggttatgtgcagagaagggagtgaacccctggattgaggttgatggtggtgttggtccgaaaaatgcctacaaggttattgaagctggcgcaaatgccattgtcgcaggttctgcagtttttggggctccagactacgctgaaggcatggtttcttctcagtctatcaaaggaataaagaccagccaaagacctctagctgtagccgcataaagagctggacgtgtaatcatttactctgtgcaagtttaccagtgatgcgatctgtatagatgtgtgtcttgtccagctatacgtataccggagatgaaaggagacggaggcagtgaagaaatatccttttttttcttctcatttttcacgaggatgccgtgcactgctcccagaatgctgtgtccaatttacaaacgcacaggtggcacatgaactagcagagtagctctctcttgaaaggaaactgtatttggggtcgatgaaccctctggtgttattcttcagactggtaaacgatgtaacatgtttgataatcaataaagtgcgtcgtatggctttcctaaaaaaaa

SEQ ID NO: 365 - DNA, 1888 bp, Zea mays
agggagcgaggcagcgaggcagcagctgcagccggccgcgcccccatctcatctcgggggtcgggacctgattaccccaatccgtttcctcaccaaatacgccacggcggcgcggcgcgctggctacccacaatggcgctcaccaccgcctccacggtctcctctccctcccgaatcatccgccgcttctcttcttctcaagactctcgccccccttcctcgctcctacatctcgccccgcgccgaggacccgggaattccccgcgcgcctgtagctggcaccggctcgttgtgcgccggatgggctgggcggcgcgagcgctcctcggcggattatcggacgccggcgccagtgagagcgacgaggaggaggagcacgtcctacgagtggggcagcgggagggcgagatcgacgacgccgtggagctctccgcggcggccgttgggccagagagatgggacgtgctgggcctcggccaggcgatggttgacttctcagggatggtggatgacgagttccttgacagattgggcatagagaagggcacgagaaaggtcataaaccatgaggagaggggacgggtcttgcgtgccatggatggatgcagctacaaggctgcagctggaggctccctgtccaactcgctcgttgcgctggcaaggcttggtagtagccagtctgctggctaccctgagcttaatattgtgatgggcggcagtgtgggcagtgacccactaggtagtttctacagggcaaagttgcgccgtgctaatgtgcacttcctgtctaagccggtcaaagatggaacaactggaactgtcattgttctaacaacgccggatgcacagcgtactatgcttgcgtatcagggtacttcgtcaactctgagttacgattcagacttggccagtttagtgtctaaatcaaatgtactaattgtggaaggttatctatttgagctgcctcacacaattgaagctatcaagcaagcgtgtgaagatgctcacaagaatggtgcaatcattgctgttactgcatcagatgtatcttgcatcaagcgttgctacaatgactttcgggacattgtaagaaactatgcagatatactgttcgccaacgccaatgaagcaagggcgttgtgcgagctaccctcaacagacagtcccatgtcagccacaagatacttaagccactctgttcccctagtatctgtgactgacggcatgcatggctcctacattggggtgaaaggtgaagcaatatacatccctccaccacaatgcgtggctgtggacacttgtggcgctggcgacgcatacgcttctgggattctgtacggcgtcctccggggtgcttctgacctgaaaggcataggactcctggcgtcgcgggtagctgctgtcgtcgtcgggcagcaaggcacgcgactgcgggtccaggacgcggacagactggctggatcgtttgagcaccatctggatagcttggagttctgctcggatgtttgaatagatcactctgcaaacgtctggtctgattgtatctgtttttttcccaagccttagaaatctatatgtacatgtacatacatcactaaccttggttagtaggtctagtacatttcctcagggcatttagccgagctgggtaaatcttgtgcgcccatttgatattactttccatctttgagtattgccatgattggaattacgtagatttcattgggcatggaaaatacaacggtatagttcatttccattgaaaatggatggatgctatgttggtctggcctttctttatgtgtagtatgtaaaaggaactttgcggtccactgaaaccgcagtgagactgaaattacggtaatgcaatccggctttgttagattgt

SEQ ID NO: 366 - DNA, 1424 bp, Zea mays
aagcagcccaaagcctcaaacccaatgcgaggcccttgggccagcagcgccttatcacttcgcctccgtctccgtggcgcgcgcgctcgcacgaacacgagtcccatgtcgtccaccgcagcgcgcgtcgtccacccggctgccgcggcgccgccgcctccccgcccacgccgcctggcgcccgcgaggtgcgcggctggatccgcgacggacacggccaccgcgggtccgacaagggtgacgaccgtcagcaaccgcggggactccttggcgatatgccgggtgctcaacggcatgtggcagaccagcggagggtggggccgcatagaccgcgacgccgcggttgacgccatgctcgcgcacgccgacgccggactctccaccttcgatatggctgaccactatgggccagcagaggatttgtatggcatgttcatcaacagaattaggagggagcgcccacctgagtttcttgaagaagtcaaggggcttacaaagtgggtaccacccccggttaagatgacaagaagttatgttgaggataatatcaacagatccaggaagaggatggatgttactgcattggacatgttgcagttccactggtgggagtactcaaatccaggctacttggatgcgctaaagcacatcacagacctgaaggaggaaggcaagataaagactgtggccctaacaaacttcgatacagacagactgcaaataattctcgaaaatggaatcccagttgtgagcaaccaggttcaacattctatcgttgatatgcgccctcagcagagaatggcagagctttgccagctaactggagttagacttataacgtatggcacagtgatgggtggtcttttgtctgaaaagtttctcgacaccaatgtatcaataccttttgctggtcctcctctaaataccccatccttgcagaaatataagaggacgtctgttgcaggttccatggtcggtgtgagattgggactctctgaacacatcaaagacaccaacgccatattctcacttgaattggatgaagaggacatgaacatcatcactgaagtgtcgaagaggggcagaaatttgatcgatattattggggattgtggtgacgagtaccgagcttagttggccatgctgctgctgggctactacagacctatatactcgtgcccaattttgcacagctctaaatttttgcctatttgggtctagcggctcagcgcactgttgaggcaaccatatacctgaatgcctattattcaggcgctagcatgtaccctccagtcctcaacagccagttataaaactgtaaatacacagcgatgcagatcgctaatgtggtaacttgttcagtcctttttagcgattactgtcccaaacaaaatgcatttctgactatatctggacaagtgctt

SEQ ID NO: 367 - DNA, 4027 bp, Zea mays
acacgcgcacacacgcacccgacccgagtcgcagggatttttttctactgctactgcgaagtgcattctctccccttccgttcctggctccggccttcccttccttccttcctccgctcgctcgcttccgcttcctcctcctcctgctcgccgcggctcgcgagggaagttccaggcttccagcggagtcgtcctcgcgggagtgcggagccccggcacggcccggcggcgccacctcggcgccggaggagggacgtttgcgctgctcccgagggccgaggcccggatcgccggattcctccacgggctcgctcggatcgaggaggcgcggaggtgggctcggttggtgggtttttcgccggccgtaattcttgtggtggcttccttgctttcggagacgcggggctggggagctcccgtgcttgcttctggctaatccgcgcttccttgcgtcgccctgctcggtgctgctactcgcttggtttcgctggattacaggacgaaaggtgacgaggaggtgcgctgacgcttttgctcggctccggttttggctgccggcggagtcgcaatctcggctagatttgccgagctgcggcggtgtcgcaatcccggctagatttgccgcgctgcggcggatgcttcgacgcgcaccggatctccaccgttcctgcggcgcggagtgaaggtacggttcccgaccggattttgggaagatggtgccgtcggggcagcacaacccgatgggcccgggccagcaggtgggcgcgtcgctgctccggactagctccagcctccttggcggcggcgccggcgccggcgccggtggccagccggggatggggatgggcgtcggggtgctcccgtcgcagtcgcccttctcgtccctcgtctcgccgcgcacgcagtatggcggtgttggcggcgggaacggcttgctggcgggcgcgtccagtgtcgcgtccatgctcagcagacagcagtcctatgggaatgggggaactggggtaatgccgggcagcggcgctgggctcccgatcggtgggctgcagcacagaggcggccttgatggcgttggtgacttggttggcactggagggccggattccatggcgttctcttcctcgggccctggtagcttgggcaatcaacttggcgtggacagcttgcagcagcagcagcagctggatgcaccacaagattcacaaaatcagcaagagcatcaacagcaaatgtcaatgacatataatcagcagcatatgatgtcacaaactcagcagcagcagcagcctgcagtgaagttggagaatggaggcgtccttggtggggtcaaactggagcagcagatggggcagcctgatcagagtgtttccgcacagatgctgcgcagttcgagtggtggtgtgaagctcgagccacagttgcaagcgttgaggagcttgggtgctatcaagatggagcaccaaagctcagacccatctgttttactacagcagcagcaacatatgttgcagctgtctaagcagaacccccaggctgcagctactcagttgagcctcctacaacaacagcagcgtttcttacaactgcagcagcagcaacaacagcagcagattctcaagaacctgcctttgcagagaaaccaattgcagcagcagcaacaacagcaacaacaacaacagcaacagcagttgcttcgtcaacaaagtctaaatatgagaaccggtaaatcagctgcttatgaaccaggaacctgtgcaaagaggttgacacattacatgtatcaccagcaaaacaggccacaggacaataacatcgagtactggagaaactttgtcaatgaatactttgccccaagtgccaagaagaggtggtgcgtttctctgtatggcaatggccgtcaaactaccggagttttccctcaggatgtttggcattgtgagatatgcaataggaagccagggcgaggttttgaaacaacggttgaggtcttgccacggttgtgccaaatcaaatatgccagtggtacactcgaggagcttctgtatgttgatatgccgagagagtcccagaattcatctggacagattgttttggactataccaaagcaatccaggagagtgtctttgagcaactgcgtgtagtccgtgaggggcatctaagaattgtattcaaccaagacttgaagattgcatcgtgggagttctgtgcccggcgtcacgaggaacttattcctcggagatcaatcataccacaggtcagtcaacttggtgctgtagtgcagaagtaccagtcttctgttcaaagttcagcatcactatcaagtcaggacttgcaaaacaattgtaactcgtttgtcgcatgtgctcgccagttggctaaggcactggaagtgccattggtaaatgatttaggatacacaaaaagatatgttcgctgcctccagattgcagaggtggttaattgtatgaaagatttgatcgatcatagcaggcagactgggtctggtccaatagagagcttacataaattccctaggagagggaattctggggttagttctgttcaagcccagcagcaatctgaggagcagaagcctgttccacagaattctaaccagagtggtcaaaattctgctcccgcaactggaatgcaagtctctgcctctggaaatggcgatgctacatcaaacaattcactcaattttgcaccatctacttcggcaccatcttcatctgttgttggtctccttcaaggctcagtaaattgcagacaagaccatccaacaagcagcggcaatggtctgtataatggtggaaacagtggtccggttgctaaggccaactcaacaaactccatgcaatcaaatgcaccagcatcgtttcctttgccagcaccctcggcatcaaatggcaatatgatgcctgctcctcagcactcaagccaaatgaattcaccaaccatgtcatcaaacctacctcctatgcaaacacctgcaagccgacctcaggaacccgagccaattgagtctcaaagctcggtccagaggatattgcaagacttgatgatgcaatcccatattaatggtgttggcccagttggcagcgatatgaggagagcaaacacaattactcctggtatgaacggtgtcaactccttagttggtaaccccatgacaaataaccctggaatcaatgggatgggatttgcggccatgggtggccttggtcaacaaatgagaacggcgatggggaacaacgcattggcaatgaatggaaggaccgtgatgaatcacagtgcgcatgacctgacacagttggcccaccagcagcaacagcgcgatttaggaaaccaattgcttgggggccttagagctgcaaacagcttcaataaccttcaatacgactggaagcctgctcagtagagtgagcaggagtcagaaagctcgcacctaatattatacagttatccttgctgggtcggtccatcactgacaacacaaaagttacgcctcaccacaacctgccctccctcagaagcggagtgttcttactgatggtgcatgctacatgttacagcgaatatgaaacatgagcgctgatcggtacatgttacatcaactgtctgtatggctgtctcccattgtgttctgcaaaagtgaggccccgtgaatcagagcctactttcacatgggactcattgtgggtgcaagtgttggcggattccaaactggggcaagatcagggcgtctttctttcccctgtttttccaggttggatgacaacgatttctctcttgcagtctgtactcttgtgtaccatggctctccgtaagttgtgaaagcatgagcacctatttccacctttgatggccaagaatctcattgtagctttgctgtaccatgtataagctgttattaactagtggaaagcagcaggaaaaaaattctgaagggagtgtgaatcttggtgtgtcatctgtgtacctgtgtttctgataaatgctctcgtttaagcaggttgatctttc

SEQ ID NO: 368 - DNA, 1589 bp, Zea mays
gagctacccccgctcgccttagctagctacccaccatggccctcccgccgtcctcctcgccgtcgtcgctctccgccgcgtcagcgcagcccacgcccctgcacctgcacctcccgaccaaggcgcccggccgcctcccgctgctccccttctcgcgcgccgccctcccgccgccgctgcgcctccgcattgcgcgcaccagcctctccccgggcacgcccctcccgcgcgcgctcctgccaccaccctccgcctccgccgacgccgcagcctccgacgtcggcggcggcggcgccggcttcggcggccatgacgacgacggccacaaccaccacggcggcgagggtggcggcgacgacggcggccatggcgacgacgccggccacggcgatgacgcgcccggcggcggcgacgcccgcggggaggcgctgttcgtgctggcgcagctgggccgcaagctcgacagcctgccgtccgatctcgccgccgccgtcgacagcggccgcatcggggccgacatcgtgcgccgcttcaccgaactcgaggccaacggcttcttccgatggctcctccagttccagggcttcagggagaggctcctcgccgacgagctcttcctcaccaagctcggcatagagtgcggcatcggtctcgtcgccaagaccgtggctgagttccagaagagaggggacaatttcttcaaagagattgaagttgtcatatctgatgtggtcatggcgattgttgcggacgtcatgcttgtctatcttcctgctccaactattggtttacagccgccactggcaagaaacgctggagctattgccaactttttctataactgccctgataatactttccaaattgctatggctggaaggtcattctcacttctgcagaggattggagcttttgtgaggaatggtataaagcttttggcagtgggaactactgcttctttgattggcactagtgtcacgaatgcagcgctcaaagcaaagagggctgttgataaggaccttgaggacgaagtcatggaaattccagtcgtctcaactagtgttgcctatggtgtatacatgtccatttctagtaacctcaggtatcagcttctggctggtgtgatcgagcagaggatgctggagccgttgctgcataaccagaagctactgctgagtgcaatgtgcttcatcgttcgtacgggcaacacattccttggctctttgctgtgggttgactatgccagatggataggcgtccagaagtctcacgaagaggcctaaagttctagcagcttgcctgcatgttccgctgtcactgcctcactaggcacgttcacaataccatcgatggcttgcctgcctctatagaatgctgatctactcttcactggaggcccccttatatataggacaaaaatcccaattttgtttggaaaaccacaagtagggatatatctgtcgaattctcgtatgcaacggcaacgccgttctacccctcaacttttttttttcctttttctactttgcaacatgcaacaagggctgtcattgatcgaaattcaaatatatgttacattgggaattcca

SEQ ID NO: 369 - DNA, 1543 bp, Zea mays
atggcctcggctgctactgcaaccctccccaaggttcagttgaggccaagatgcaacagctacttccaggtccgccccgtccttgcactccctctcccctcccgaaagttcagctcatcagttgccctgttgattcgttccaacatgccctcaaccctaaggttgcttgtttcagctggaggaaggaggacattcctgccggtgtctgcagttggatcaggtcagggctcatcggtcactgaggccgacaggaagagcgatttgtcgctggagaacgtcaagacgtccgttgtatcccgcgacggtgaaaagattaatgtacgagtgcagttgcctggaaaggcgacgcaaaaggtgtttgatgaggctctgacgttcttggcccgtgatgcgccaccggttcctggttttagaaagtccaaaggagggaaaacatcaaataaccaactgagcagagattgtgctgtttctgtccttcagatacccagcagcatcctgctgcagatgcttggcaagagccgggtcaccaaattcgttcttcaggaaatactgagcatcaccattgaagaatttgtcaagaaggaaaacctgaaggtgaaacctgagatccagacaacccagtccgaaggcgagatggagtccgcgttcgcgccgggatcagcatttgggttcaatgttgtccttcagctcgagacacctgactctgatgatccagaggagaaacctggctctgatgacgatttacaggaggaatctggttcctcggagtagaaagaaatgcatatcgcctgcatgcatttatcaaccttcttcatgtgccattccttatgaatgaatgtactgaatggaaagccgttgcaaccgttttgagttgagagttgcaactgaaacatttctgaagatatgagtggccgactcgcctctcttaacatgttgacacacagcgagcatacgcttcagaaatcggaacctgctgcacatatgattggaactgaagaaaatgcgcgtgggaggtccatgcccacaatgataacacactagagcttcagcttccagcgcacactacaacaagatcttatccgctttgtctggagtatcatccgttgacaactcggcttccaactaccagatcaatcattccgggtgctccccacctcccaaggttcacactcccccacatcgccagtgacctaccaactgcacatattattcgttccttttttttccagagaaaaccagccgcatatattcttggagaggagaaagacccggccctaaacatttgcacttctgattctatggcccatgagaattccctgtcatgacagtattttgcaacttcctgacattattgtttcagtgctgaaatgttcacgtcatgggtagtagccaagtcattataccagaaagaagacatttcattaggaaacatgatcagactcaggacctgggatgatctggtctaccaccttattctctatattcctatcacgcttccaatatttttttttctgacgatgaatagatacacgttaacaccttc

SEQ ID NO: 370 - DNA, 2997 bp, Zea mays
aggcaacctccttttgctccacctcactcgccacctcctggcctggcttccttcgcctccctcccttgggaccggtatatctactacctctgttccttcacctctccttcgccgccgcttccctcctcctcctcctccacctccgccctcgatccgaccgcgggccctaaagcacttttcgcctttttcggaggccacgggtcaccaccgacctccattccattcatttgccgattcacctacacagacacacacagaaactttggatgcaaacgaggagggagcccttgaaggcaaaccaatgcgcaccgccgcttattcattaaccaaagacttgcatccaaccaatcccaccacttgtgtctacctcttcgagtcaggctgatgggaggtgcctgtcagcaactctccgtggacggagatgcgaggacgcctgcgaatgaccgcgatccggccggcctgctccagcatgatgatacggaaaaccagcagcagcagcaggcctgctgggagcgcttcctcctcaaggagactctcaacgtcttgcttgtggagagtgatgattcaaccaggcaggtcgtcagtgccctgcttcgttgctgcatgtaccaagttatctctgccgaaaatggccagcaagcatgggcttatcttgaagataagagaaacaacatagatcttgttttgactgaggtttttatgcccggtgtatctggtatttctctgctgagtagaatcatgagccacaatatttgcaagaacattccagtgattagtaagtaactttcatctctacagtgtagttcatatcatgattaaaatgttgctttcatcatttatttagtcccaatgcttttagctgctacactgatgttgtttgtgtgcagtgatgtcttcgagtgatgctatgagtacagtctttaaatgtttgtcaaaaggtgctgttgactttttagtcaagcctatacgtaagaatgaacttaagaacctttggcagcatgtgtggagacaacggtgtcacagtgcacagaactcatggactaagcttgctgtggagatcgacagtccacaagctatgtctctggaccagttagccgatccagccaatagcacctgtgcacaagtaatccactcaaagtcagagatatgtagccacagatggctaccaggtagcagcaacagaaactgcaagaagcaaaaatacactaatgatgactttaagggaaaagacttggagatagatggtcctggaaatctatatatggatcaccaatcttccccaaatgagagacccatcaaagcagcagatcatgaaaacaattccaaggagtcaatgatgggaaatttaggggatgcaactgttcgagctgctgacctaattggttcaatggccaaaaacatggatgcccaacaggcagcaagagctgcagatacccctaatttctcttctgaagtgccagaagggaaagatgactttaagggaaaggacttggagataggtggccctagaaatttatatatggatcaccaatcttccccaaatgagagacccatcaaagcagcagatcatgaaaacaactccaaggagtcaatgatagaaaatttagaggagccaactgttcgagctgctgacctaattggttcaatggccaaaaacatggatacccaacaggcagcaagagctgcagaagatacccctaatttctcttccaaagtgccagaagggaaagttaccacttttattgcaaggtaccatacatctgcggcttccaatcaaggtgggacaggattggtaggtagctgttcgccgcatgataacagctcggaggctgtgaaaacggattctacttacaacatgaagtcaaattcagatgctgccgcaataaaacaaggctccaacggcagtagcaataacaatgacatgggttccactacaaaggatgttgtgacaaaacccagcacaaataacgagagggtgatgttgccctctgctattaaggctaatggatacacgtcaacattccatcctgtgcagcagtggatggttccagataatgcgacagcagggaaagcgaaggctgatgaagtggccaacaatgcaggcagaaatagtcatcctggtgacgtgcagagcaacctgacgcaacaacatcgtccaacccttcattacgtccattttgagaatagtggatcaggtgccctgcaatgtggttcctccaatgtatttgatcccccacttgaaggccaggctaccaataactatggtgtgaaagccgggagcaactcaggcagcaacaaggggcagaataatgggagtacagctggtgcgagcacggctgctgcaaatgctggacggacagatacagagatacgggctatcgataaaagtggacctggaggtggcagtgggagtggcaatgacacatatgtcagacggcttgctgcgagcatgacaccacgacaagaacagctaaagaaatatagagagaaaaagaaagatcggaactttgggaaaaaggtgcggtaccagagcagaaagaggctagccgaccagcggccaagggttcgtggacagttcgtgaagcaagctgtgcaaaatcaagagggagatggagagagatgacccccccccccctctggcttcagctcatggttgttagacgtggcggttgatgattcttccttctctggtgtgatctgatatgatcgacaacacaccatccttccttttcttcattggtttcttcacatctagaatttactgcctgaccgggaaaaaataagctaggaacttctatacatgtgtatgcatttctaatcatgtagaagaataagtgtgtcttgactctagataattttaggtagagtcatgctcgctctcctacattatgtgatgtaactgaagtgttgttgtgttgtcatgtatggtcttggatcactttctgtcaatatattactagcccacaactactattaatttgatgagatgtatataat

SEQ ID NO: 371 - DNA, 1860 bp, Zea mays
ggaaaccaagggcggaccttcccctcctccaagcaaatccgaggcccacccacgggccgctcgaacatctgtcaccgccaagtggccccacccacccctcccctccgctgccccttcttctacaaataccccggccggccgcggccgttcccgaatcgagcggtgactggcgaggcaaaagcattgcgaccacagacagcgcgcgcttcaaggcctttttttttgagataacaaggaggagaggaggagatggcggtcacgatcacgtgggtgaaggcgaggcagatcttcgacagccgcggcaaccccaccgtcgaggtggacgtgggccttagcgacggcagctacgcgaggggggccgtacccagcggcgcatccactgggatatatgaggccttggagttgagggatggaggatctgattatcttggcaagggtgttcttaaggctgtcagcaatgtaaataacattattggaccagcaattgttggaaaggaccccactgagcaggttgagattgacaacttcatggtccaacagcttgatgggacctccaatgagtggggctggtgcaaacagaagcttggagcaaatgccatccttgcggtttcacttgcggtgtgcaaagctggagctatggtgaagaagattcctctttaccagcacatcgcaaatcttgctggaaacaaaactctggtgctccctgtacctgcctttaacgtgattaatggagggtcacatgctggaaacaagcttgccatgcaggagttcatgatcctcccaactggtgcctcctcgttcaaggaggccatgaagatgggagttgaggtgtaccacaacctgaagagcatcatcaagaagaagtacggtcaggatgcgacaaatgttggggatgaaggtggttttgcacctaacattcaggaaaacaaagaaggccttgaactattgaaggcagccatagaaaaggctggctacactggaaaggtggtcattggaatggatgttgctgcttctgagttcttcggtgagaaagacaagacttatgatcttaatttcaaggaggagaacaacgatggctcaaagaaaatttcaggcgacagcctgaaagacctgtacaagtcctttgtttctgagtaccctatcgagtcgatcgaagacccatttgatcaggacgactggagcacttatgccaaactcactgatgagattggacagaaagtgcagattgtaggagatgatcttctcgttaccaaccccaccagggtcgccaaggccatcaatgagaagacctgcaatgctctcctcttgaaggtgaaccaaatcgggtctgtgaccgagagtatcgaagctgtcaggatgtccaagcgcgccggatggggagtgatggcaagccacaggagtggcgagacagaggacaccttcattgctgacctctcagttggcctgtctacgggccaaatcaagacgggagctccttgccggtctgagcgcctggccaaatacaaccagctgctcaggatcgaggaagagctcggtgatgccgcggtctacgccggagcaaagttcagggcaccagtggagccctactaagaaaggaagaggatggggatgttttcttgtggagctatactagctcgctgctgccttttgttacaatgtttgtacggtcgcaataaatgtatggtcgtgtttgctcgagagctactcaggtgattttgtcgtgggagcaccaaaagcagaaaagaactgtttttttcttctctctctctagattctgacgagtggtggtctgcactcgtcgtaatgtcgtttgcctaaactgattttgatggaacaggaaatcttgctggtcttgccata

SEQ ID NO: 372 - DNA, 1803 bp, Zea mays
aagccaggccactctaccaccgcacgctcaactcaaacccccgtcccgaacgcagaagaccggcggcagcggcgggggtgtgtgtgtgtggactggactgtaaccaattgccatcaatccaggcatccatccatccacccgccccgctgacggcggcaatggcccggctcgtgctctccgagtgctgcggcctcgcgccgctccgccgcctgcgcgccggccggggcgccattgcggcgccgtcaccccccgcgctctccgcggcgccgcgccgtcgtcccgcgtccgcgtccatccaccgcgactgggcgctccgcgtctccgcgcccacccgcctcgcctccgccgccgtcgaggaggacaagccgagcgccgcgccggggcaggaggagggcgcggcggccggcggggagttcgacccgggggcgccgccgccgttcgggctggcggagatccgcgccgccatccccaagcactgctgggtcaaggacccctggcgctccatgagctacgtgctgcgcgacgtcgccgtcgtcctgggcctcgccgcagcggccgcgcgcctcgacagctggctcgtctggccgctctactgggccgcgcagggcaccatgttctgggcgctcttcgtcctcggccacgactgtggacacgggagcttctcgaacaaccccaagttaaacagcgtcgtcggccacatactccattcctccattcttgtgccataccacggatggaggattagccacaggacgcaccatcaaaaccacggtcacgttgagaaggacgagtcctggcacccgctaccagagaggctgtacaaaagcctggactttatgactaggaaactgcggttcaccatgccgttccccttgctcgcgttcccgttatacttgtttgcgaggagtccagggaagtcaggatcacacttcaacccaggcagtgatctgttccaacctactgaaaagaatgacatcataacatcgacggcgtcctggctggccatggttggtgttctggccggtctcacctttctgatgggtcctgttccgatgctaaagctctacggagtcccatacttggtatttgttgcttggctggatatggtcacatacttgcaccatcatggccacgaagacaagcttccctggtaccgtggaaaggagtggagttatctgcgtggaggactgacgacgctcgaccgggactacggatggatcaacaacatccatcacgacatcggaactcatgtcatccatcacctcttccctcagatcccgcattaccatctcatcgaggcgaccgaggcagcaaagccggttcttggcaagtactacaaagagccgaagaagtcgggtgctctgccgtggcacctattccgggtgctggcacagagcttgaagcaagaccactatgtcagtgataccggagatgtggtctactaccaagctgagtcgaaaacgagcacctctgcactaaaatccgattgacagggagtatagagcgtagcgtgttcttcatttttctcggggaggggctgtgcctgaagacctgaccagcctccacctctgattagcgtgagtgggtacgtcgactgaagaatgtaagctggcgaagtagtaccatgtatgtatggagagggttaaatgtaattctttccaatggtccaaggcggatgctgcttccgatgtagcagcatgcgattctttggacaagaggtatactattacagtgaagagtgaaaaaaagagagagttagctacatagaaagctttctgagctctatacgtactacctccgttc

SEQ ID NO: 373 - DNA, 1411 bp, Zea mays
agagccgtcttggccgcgtcgcctccttggcgaacgggcgcgtttggcgccacgccacgccataccgctgccacccaccgcaatccaagcaagcagccccgctatgtcggtcgctgtgctgcgagtgcgagccatggagctactggcacgacccgcagcggcagcgtcgtcctcctgcgcgcgaccctcgctacagctccccgccccgggcacatcccgtccccgtcggcccgggttccctactctccgcgcagctgcggcggcagcggcggcgatcgccgcggagccgcaatcgaacgagcagcagaatatcattatggaaactgaggtgtttgcctgccctgtctgctacgagccattgatgagaaaagggccaccaggcataaacttgccagcaatttataggtcgggattcaagtgttcaaagtgcaacaagtcatttaccagcaaagacatcttcctggacctcactgtaactgcagggacaaaagaatatagcgaacagaagcccgctagaactgagctgttcaggagtccacttgtctcatttctttatgagagagggtggcgacaaaactttaatcggagtggtttccctggtcttgacgaagagtttcaaatggctcaagactattttcaacccattgctggtggtatccttcttgatgtcagctgtggcagtggcttgtttactaggaagtttgcaaagtctgggacatactcagctgtgatcgctttggacttctctgagaatatgctccgccaatgctatgaattcattaagcaagatgattctctcctcaatgtgaatctcgcactcgtgagagcagatatttcgaggctcccttttgcttcttgttcagtagatgccattcatgctggagcggctatccattgttggccctcaccctctaatgcggtagctgaaataagccgcgtcctgaggcctggtggagtgtttgtgggaaccaccttcttatcctctcccaggaacaacccattctctgttgaagcactaaggccacttagacagattgttggaccagttaacaccagctacaactattttactgaaggagagctagaagacttgtgcaaatcctgtggccttgtcaactacagcagcaatgttcagaggtcatttatcatgttctccgggcaaaagccatactgaagaatcctgtcaaatccaaactctgttgtttcttcaggattccttgcaaaaacacgtttagaagtatttgcgtatatttgtgccatactgtgcataggttccttaatttctgtactattccttaatgtattcagtaccaaaaaaaaatgcatgctgcagactcttagaaaagccctacgtttctgtgaatcaacaaacctgaaagcctagaataatgcttgaattctattgctctcc

SEQ ID NO: 374 - DNA, 3931 bp, Zea mays
agcctctctgctgctggtgggccagcgttacggcgcgcaaacctccgcctctcccctcccctgtcccctccaatcctccattctccggccaccctcgcttctccgtccctcggcaatccgcttgtcccccgttgcccgctccgttcagaagcgcctcgccgctgaccggtcgtgacccgcctcgcacctccgccttctccgtccctcgcggccgcggctgccgccgaatggaagccgcctcatgctgccgcgtcttctccacgcagcggtgccgcttcccgctccgcaggctgtcggcgccgccgtggccgcagccgttctgcaccgagtccagcggcggcctcgtcaccccgtcggcctccaagcggaggtccaggggccccgtcatggccgcgaagaaggccgcggagggcgaaaaacaagaagatggaaaatacaagcacactgtggatctcccgaaaacaacatttgggctgagagcgaattctgtacagcgggagccagagctccaaaaattatgggacgataatcaggttctgaaaagggtttctgaaaggaacactgggactgcttttgttctccacgatggccctccctatgctaatggtgatcttcacatgggccatgcgctcaataaaatcctcaaggattttataaatcgctacaagctgcttcagaatcataaagtgtcctttgttcctggttgggattgccacggccttccaatagaactaaaaggcaagttcatttttttgaagtcaatggataaggaaactttgagtgctcttacacccataaaattaagacaaaaagctgcaaaatttgctaaagcaacagtcgatgcacaaatgaaatctttcaagcggtatggtgtatgggccgattgggacaacccttacctaactctgtcaccggaatacgaagctgctcaggttttctgtctgctttctgcttttacagaatatggcaatgatattaacaacctcttacagaacaaaagtcattttgtttgcttatccattttgttattccagttggaagtgtttgggcaaatggttatgaaaggatatatctatagaggacgaaagcctgtccattggagtccatcatcacgtacggctttggcagaagctgaactggagtattccgaaaatcacatttccagaagcatatatgccgcattcaagattactaatccatctaaatctgggatgctagacgatttttttccaaatgtatctttggtcatatggaccaccactccatggacaattccggctaatgctgctgttgctgtgaacccaaagcttatttatgcagtagctgaggtacagtctgtatttgaaagtgagtcaacatccggtggtaaacaaagaaaagttggaaatatattgagttctgagaaaggaaaactgttcgttattgtggcttctgatcttatcacaactcttgagtccaaatggggtgtgaagcttgtagtacacaaatcatttcccggatctgccttggagcactgcaggtatgcccatcctgtgaatagcaacgaatgttccgtcattctaggaggagattacattacaactgaatcgggcactggccttgttcatactgcccctggccatggccaggaagactacataacaggtttgaagtatgggcttcctatcatttctcctgtggacgatgaagggaacttcacggctgaagctggacagttcggtggtttgtctgtcctgggggctggcaatgctgcagttgtgaagtatctggatgaacagtattcactcattttagaggaaccatacaaacacaagtacccctatgactggagatctaaagaaccaactatattccgagcaactgagcagtggtttgcatctgtggatggttttcgtgatgctgcaatggatgcaatcagacgagtaacttgggttccttctcaggcacaaaacaggattgttgccatgacctctagccgttctgattggtgtatttcacggcagagaacttggggtgtccctattccagttttttaccatgtggactcacaggaacctcttataactgaagaaacgattgaacacatcaaggctattgtgttgaagaaaggtagcgatgcatggtggtatatgacaactgaggaacttcttccagatagatatcgggacaaagcatctgaatatcgcaagggaactgatacaatggatgtttggtttgactctggctcttcatgggcagctgttttagcaaaaagggacggtcttaattttcctgcggatatttatcttgaaggttcagatcaacatcgtggatggttccagagctcattgttgactagcattgctacaacagggaaggctccctactccagtgttattacacatggatttgtactggatgaaaagggtttcaaaatgagtaaatcaattggtaatgtagtggacccagagaaaatcattgttggtggcaaaaaccatagggaagaacctggctatggagcagatgttctccgtctatgggtttctagtgttgattacactacagatgtgttgattggcccacaaatcttgcgccagatgtctgacatgtatagaaaactacgaggcacgatgcgatttcttttgtcgaatctccatgattggaagccggataattctgtgccgtacaatgatctgccaaaaatcgacaagtatgcacttttccatttggagactgtcatgacttccatgaaggatagttatgaaagttatcaattctataaagtataccagatccttcaaagatttgctactgttggtttgtccaatttctatttggatgttgcaaaggatcgcctttatgttggaggccgagtcagcttcacaaggaaaagttgtcagactgtgctcatggcacatctgctctaccttgttagggccatttccccgattatgcctcacctagctgaggatgtctggcagaacctaccctttcaatacaccttgcaggatggatcccttgcaaactttgtttttgatctgaaatggccagaaaagaatgaagaatggctctcggccccgaaggatgatgttgatttcctgggtgttatcctggagttgaggtcagaggtcaacaaaattttggagaatgctcgcactggaaagttgattggttctagcttagatgcaaaggtttatctccataccgaaagttcagatacggtattaaagctaaaggagctatcttctgcatccaatgatgcagacgctctgcatcgcctgtttatcacatctcaggtcgatattcttccaatcctaaatgaagagattacatcatctgtaccatacacaggaaagttcagtaacccacgcactggagtcatatggattggtgtgactcgtgcggatggtgcaaaatgtgagaggtgttggaattacacacaggacgttggatctttccatgaccatcctactctctgcgttcggtgctatggtgtcattgagttgcagacacaacctgcggccgcagctgtcagttgaaaggagtgatgttaacgtatcctatcgaaccatctaattttgaggatcattggtggaattcattcttttggagagctttcacgctaccatgtggcggtagcctgggactccagcttgaatcaagttttgcatgcagcaagctgtactttagattcttcatacataggtcacgagagttgtttggagcttgggtcatcgcttactttcccatactactggggggcttatttggaacagttttttacacaaaactcctgacctgtaaatcaattttggaaaaccgtatccggtggtcgatccatgtattaatagagtaataatgttactatgttcatccaaatctcaaagacgtgatggttgtgttgaaaaaacagcttgaatcacttgcttatgctcaactgttttttcttcat

SEQ ID NO: 375 - DNA, 423 bp, Zea mays
atggccgccaccgccctgagcatgagcatcctccgcgcgccgccgccctgcttctcgtccccactcaggctcagggtcgcggttgccaagccgctggcggcccccatgcggcgccagctgctgcgcgcgcaggccacctacaacgtgaagctgatcacgccggagggggaggtggagctgcaggtgcccgacgacgtctacatcctggacttcgccgaggaggaaggcatcgacctgcccttctcctgccgtgcggggtcctgctcctcctgcgccggcaaggtcgtctctggctccgtcgaccagtccgaccagagcttcctcaacgacaaccaggtcgccgacggttgggtgctcacctgcgctgcgtaccccacctccgacgtcgtcatcgagacgcacaaggaggatgacctcctataa

SEQ ID NO: 376 - DNA, 1706 bp, Zea mays
acgctgcttcgtcctctctcttcttccttcccctcccccgctcgccaatcgccatcggtcactcttcctcaccttcaccttcaccttccgaaaagagagaccgaggaggatcacaggaggacatccagataagcaggaatagaacaaccccataaaccatatcggaccatacatttgcaaaagcttgtcggttttctagcctccaatcgtccctcaactcaagcctgatgaaagaagaggaggtgaatccttaagagcaagcagactttgctgactgaacaagacatgtgacttggcaagaaagcatggtccttaaccatctgcagcttctggctgcgcctcacatcaagtaactcagctgcaagcggcaccttctggacatacctgacatcattaggaaaaatattggcattagcacgactccaaccaggttgtctgccatagttttgctggagggacaaaaacagaagcgttcctgactctacctcaaggatgagagctgcgtcctccacggtttaccctgtctaccttagcctccaccgccaccccaacagccaccaagcctcttttcgtccctcgagagcaaaccatgacaacacccataaatgtaccaagccacccaaagttcttagacggtctctcttctccctgcctgcctcatttcttctcctccacacatcctcctcccttgccgtagatgacgcaaacatgccatctacctcaacaattgacaccacgatcacagatcgcatcttcatggacttcagcgtctgtccaagctactttcgctcagacagacctctaggagctgagctttcctcgtgccctgattccgagcctcttggtcgtgtcgtctttggtctctatggccggcttctccccgtcactactgccaatttcaaagctacgtgtactgcagctgcatataggggcacccttgtccacaagctccttcagggacagttttttgctgctggtcgacaaggtcctcggcatgacaagggtgaggtccagcctccctctggcctcgttaggaattctgagactgttaaccctaaagcgttcgagctaaggcatgcaaggcctggcacgctttcgttatgccttggacagaatgacgatgatgacgacatcaagctcaaccccaattatcacaatcttgaattcttggttactacagggccaggaccctgtcctgagcttgatggccagaacatcgtctttgggactgtattggaaggaatggatgtcatcaccagcatcgcaaccatacctacctacaaaccagctgaaaggatccgcctcttcaacggctttgcgcagttgattggtgatggaagggctcaaactgcccgggctatgtgggaccgcccgcttaagaccgtgtatatcagcgactgcggggagctgacagtaaccaaaccatctctttcccctccaagcttgccatgactgccagtgtaatgacactacccacatagccagttttctgtctctgttgcttgggtcctctttctgtactctatatatgcagtgtatatattacctgtgttattaaacttatgcatgttccatgagctgtatatatatcgcttccgttgttaatttatgcatgttccctttgacaatgactgtacttgatgagtacatggatgttaattatatggtcaaggcctaatcaattatagagtcctaagcttaagggg

SEQ ID NO: 377 - DNA, 1422 bp, Zea mays
ccaccatcggccatcgctctagccagcccgcccgccagcgagaggtcaaaaaccactacgagccaaaaactggagcccagggaaagcgacgagcaaaccaaacatggcggcgatcctcgcgcgcgccggcgtcatcgccaccgccggcaaaggtttctcgggccgccgccggggcaatggtatcgtcgtcgcggcggtcactaaaacgggggctgctgtgccacaggagggggcgctggaacggccggcgtggtccggcgagaccacgctgtcgcgtctggttggcgcgctcatcgcgttcaagccgctctacgcggtattgaagctcgcctcccgcgaggtcatcatcaggacggcggagaagtcgaacatcccgtggagggagatgacgaaggaggtgctggagtcggacgtgtacgaggtgttcgagagaatccaagacccaaacctcgtgtaccctgactactatctcaacccgtttcatgcctacgacgaagggaatctatcatggctggctgcagcagaggcggagcctgcaacaatgtcgatcgcaaagagggcaatacctgaggctacatcaatcgaagaggccaaccaaattgtccgcggcaactggctgaatgtgattgaggagcatcatctgaagtactcggggaactgtcaggtaaacgacatcctagacattggctgctctgttggagtaagcaccagatacctcgctgagaagttcccatcagctcaagctgttgggctcgacctatcaccgtactttcttgctgtggcggcacaaaaggaagaaaaactgtcacggccaaagcctattcgctgggttcatgccaatggtgaagcgaccgggctgtcttcagattcatttgaccttgtctcccttgcttatgtgtgccatgagtgcccagcacgagcaatcacgggattagtgaaggaagcattcagggtccttcgcccgggaggaacaatcgccttaactgacaattcgcctaaatccaaagtgcttcaggaactatccccagttttgttcactctgatgaagagtaccgagcctttcctggacgagtactacatgctggatttggaggagacgatgagaaaagtgggctttgttaacgtttgctccgtcctgacagaccccaggcacagaacagtcactgcaaccgtgccttactaattgggtcagaccatcaaatcccaagcccggccggtgtacaacaattgactatttgaaattttgtatccttactggtatggttgcacctgtataaagtagagcaatctgagtgaaacaacaaatcgaagtacaccaatttaccttccacgcatggacattatgaagtccaacactaggactgttatggtcagatgattcagggaaccaatctaaaaaaaaactcatgtgatattgtagcc

SEQ ID NO: 378 - DNA, 1648 bp, Zea mays
cggatccggcgggccctgcaacggcgcggcagcaggataagaggacgcggcgcgcgcatccacaagcagcggaggagcccgaccacgccagtgagcccgcccgattcgccgtcgcggcggccacgtttcccctccaatggccaccagctccaccgccttgctgcaccttgtcataccggcctcccgccgccgccggcacttggtgcctcgggccgcacactccgagtccgccccgcccgccgcctccgtcgaccgccgccgcttcatcgcccacaccgccgccgcggccgccgtctcccctctcgtcttgccccgctggacccccgcggctcgcgcggacgaagcgccggcgctctccgagtgggagcgcatcttcctgcccatcgactccggcgtcgtcctcctcgacatcgccttcgtcccagacgacccctcccatggttttctccttggaacaagacagacaatactggagacgaaagacggcggcaacacctggttccctcgctccatcccttccgcagaggacgaagatttcaactacaggttcaactcggtaagcttcaagggcagagagggatggattatcggcaagcctgcaattctactgcacacctcagatgctggcgagagctgggaaagaatacccctgagtgcccaacttcctgggaacatggtttacataaaagctactggggagcagagcgcagagatggttaccgatgagggagcaatctatgttacctctaaccgtggatacaactggaaggctgccgtgcaggagaccgtttcagctactctgaacagaacagtttcaagtggcattagcggtgcaagctactacactgggactttcaacacggtgaacagatcggccgacgggcgctacgtggctgtgtccagccgagggaacttctatctgacgtgggagcccgggcagccgttctggcaaccccacaacagggcggtggcacggaggattcagaacatggggtggagagcggacggtggactttggctgctggtgcgcggtggtggcctcttcctcagcagaggaaccgggataactgaagattttgaggaggtgcaggtgcagagccgggggtttgggatcctggacgtgggctaccgctcgcaggaggaggcctgggctgctggtggcagcggcgtgctgctcaagaccacaaacggagggaagagctggatgcgcgacaaggctgccgacaacatcgccgccaatctctactccgtcaagttccttgatgacaggaaaggcttcgtgctgggcaacgacggcgtgttgcttcggtatcttggctgacattctatgtatatgtgtgtacagcgaacggcatgtgctgctgctactactactgtaaaaggctgcttactgtgcttgcgttctctcttctgcaacccaaattgagtgtaaagatgcatgtgctgcttgctaggaacttgaaaaccttgtatacccgtatctactatctatatatatgctaccttgttgcaaacaaccctcaaaccattgagaagctctccattctcaatgcctgggacaaatcattctactcaatctatttgcatttttctacgaagacccatattaacaaaggccatctttcagagccaataaaattccctgcat

SEQ ID NO: 379 - DNA, 846 bp, Zea mays
tcggcgagcggcgaatctgtttcatccgctgcaagtgatccacaccaggcgcgcccccacaacaatccgcggcgtctctctccgcgcctccgctccacagaaccagctggggctagcccgccgcgcagcgcagccacaaattaaacggagcccggcctgggcatccattattcgttgcagtagtcgcagctgacggacgactgaaccaccgacagacaacatggccgcctccgcctccaccgtctccggcctcgccggcgcctccctggccagccgcccggcgttctccaccagcttcacgcggggcagccgggtgtcggcgaggaaccccctgatgagcaggaacctggagaggaatggcaggatcacctgcatgacgtttccccgggactggctgcggagggacctgagcgtcatcggcttcgggctcatcggctggatggggccgtccagcgtcccggccatcaacggcaacagcctcacggggctcttcttctccagcatcggccaggagctggcccacttccccacgcccccgcccgtcacctcccagttctggctgtggctagtgacgtggcacctgggcctgttcatcgtgctcaccttcggccagatcggattcaagggcaggaccgaggactacttcgagaagtgaagcggttaagatcctatccatcatccctggtgctgcgctgcgttgcgttgcgtgcgtgctcgccgctatcgaacctttgctgtatagggttccgatttcgtcgaatgtaatgtatgatgctacttttgagcttcaatgtaaaatctatgccgtccggccccaacgcgctcaggtttaatttgatgcatcta

SEQ ID NO: 380 - DNA, 1468 bp, Zea mays
gtggtcctgtggacgtggcgcgacgggcatcggctgctccgcatcccctctccaccactcctctccaccccaaaaccccccgcggcgggccacgctaccacctgcccccgcccacgccatggcgtcgaccagcctcgccacgctgccgtcgcagctcgcctccccggtccgcctgcgccgccgcgccgcactctcctccgctagccgcccgcatttcctcctccatcgtgcaaccaaaggtggatcgcaatgcaggctggcggtgacctgcaacgcgcaggcggtggcgccgaccagctttgcgcaggggacgcccgtccggccgacgagcatactggtggtaggcgccacggggacgctggggaggcaggtggtcaggagggcgctggacgagggctacgacgttaggtgcctcgtcaggccgcgcccagcgcccgcagatttcctccgggactggggtgccaccgttgtcaatgccgaccttagcaagccggagaccatacctgcgacccttgttggtattcatgccgtcattgactgtgcgacaggacggccagaagagcccatccggacggtagactgggaaggaaaagttgctctaatacagtgtgcaaaggctatgggaattcaaaagtatgtgttctattccatccacaactgtgacaagcatcctgaggttcccttgatggaaatcaagtattgtactgagaaatttattcaggacagtggtctggattatatcatcatccgtttgtgtggtttcatgcagggtcttattgggcaatatgctgttcctatactagaagagaagtccgtctggggaactgatgctccaactcggattgcttacatggatacccaggacgtagctcgactaacgtttatagctatgcggaatgagaaggccaacaagaaactcatgacctttgctggcccacgagcttggacaactcaagaggtgattactttgtgtgagaggttagctgggcaagatgccaatgtaaccactgtacctgttgcagtcttgagatttactcgtcagttgacacggtgcttccaatggacaaatgatgtggctgacagactggcattttcagaggtgctctcaagtgacacagttttctctgctccaatgaatgagacctaccagcttcttggggtggatgggaatgacatcctcagcttagagaagtatttacaagattattttaccaacattttgaagaagttaaaggatctcaaggcacaatccaagcaaactgatatattcttttgatataggaaggatttctgtgacctagggacataattacaaatctgtgtctcaaatgacagatgagtgagcacaagttttcctgtatatttgcatttttgcatgtgcaagaatgctctgtgctattagtgatgtgtatataatcttaacattttgagctatcaaagttccgaaatttgtgcaaaacagcataaa

SEQ ID NO: 381 - DNA, 2719 bp, Zea mays
ggacgaaccgacggccctcgtgccgcctgcccgccccgaggcccccacttgcccttgcctcacatctcaccttttgcctcggcatattcgcctccgatcgaacgcagtcgcgggccggtgcgggtacgctgctggtgaggcgcccgcggcccaccaccccatgtcaccatgtgcggtggccgccgtgctggtgatgcgggcagcggccggtgcagcgattgtgtggcgcccgtgcgctagccactaggcggggcgcacgccgcctgtcacgtgggcgatatttttcctggccctcggcggtcggcgcgctgcgtcgccgcttgcttcctcctctacttgagtgccgagtcgcctccgcgctctgcagtcccccgacccggagccaaagccaacaaacagccgctccgccttcttccgcggctgcagccagcgcgaggtacctggctggcattttgcatttgaggtcatcattgaatggctgcaacgatgggttcaatatctgccaatggttcttaccaaacaaataggcccagtgcactaaagcaggcacctcacatgcaattccaacaatgttgcaacggtggacttaggttcttaagcaagcattcccaatccacgcgaagtaagatacaggtggctaaaagaagagctacagataatggaattcatccaaagactacgggacatcgggcacctattgtatgttctgctgggatgactattgtatttgttgcaactgaagtgcacccatggtgcaaaactggtggcctcggtgatgttgtaggaggactgcccccagctttggctgctatgggacaccgtgtcatgacaatagctcctcgttatgatcaatacaaggatgcatgggatacaagtgtccttgttgaggtaaatattggtgacacggtagaaactgttcgcttcttccactgctacaaaagaggagttgatcgtgtttttgttgatcatcctatgtttcttgaaaaggtatggggcaagactggagcaaaattgtatggtcctactactggaactgactatcgagataaccagttgaggttctgccttttgtgccttgctgctttggaggctccaagagttctcaatttcaacaattctgaatatttctctggaccatatggggaagatgttgtcttcgtagccaatgattggcacactgctattttgccatgttatttgaagagcatgtataagccaaatggaatttataaaaatgctaaggttgctttctgcatacataatattgcctatcaaggtagatttgcccgagcagacttcgatcttcttaatctacctgacagtttcttgccatcatttgattttattgatggacatgttaagcctgttctagggagaaagcttaactggatgaaggcagggatcattgagagtgatctggttctaacagtcagtccacattatgtcaaggaactcacatctggcccagataagggtgttgagttggatggtgtccttcgcacaaagcctctagaaattggaatcgttaatggcatggatgtttatgaatgggatccttcaacagataagtacatcagcgtgaaatatgatgcaacaacggtaactgaagcaagggctctcaataaagagagtttgcaagcagaagtcggattgcctgtggactcgagcatccctgttatagttttcgtcgggcgtctcgaagaacagaaagggtccgacatactcattgcagccattccagagttcgtgggcgagaatgtccagataatcgttcttggcacgggaaagaagaagatggaggaggaactaacgcagctggaagtgaaatatccaaacaacgctagaggcatagcgaaattcaatgttccattggcacacatgatgtttgccggggctgacttcattatcgtcccaagcaggtttgagccatgtggtctcattcagctgcaagggatgagatatggagtggtgagacttcctagctccgctttgttacagcagttcagattttttgttacaattcctatctgttcatccactggaggacttgtcgacacggttgaggagggcgtcaccggattccacatgggttctttcaatgtcgagtgtgaaactgtagacccagccgacgtgacagcagtggcgtcaaccgtcacgcgagccctgaagcagtacgacaccccggcattccatgagatggttcagaactgcatggcgaaagacctgtcctggaaggggcctgcgaagaagtgggaggaggtgcttctgggccttggagtcgaggggagtcgagctggcatcgacgacgcagaggagatcgccccacttgccaaggaaaacgtagccactccgtgagggcttggtggtgcctcgactcggaaacacgcgttggtgataggaagcgtcttctaggatcctcctgggcggccttgtggctggtggagtgaggtgtccagtcagacacggtttcgcctctactactagtctactactactacctcattgtaatataatccttggcattctaaaaaatgccatgcctgctctaattcttctgttcttgcgcaacatacacttcccgcttccgttcggtcgacaacggttatgtaaatatagcgaatgctagcgggcagctcgaatcatcccaagtggtagggtcacgatggagttgtttgaaatggctcgttcttgtgcatagttcgcttctcagtggtggttt

SEQ ID NO: 382 - DNA, 1726 bp, Zea mays
ctcccacctctccttccttaccggaagagaaaaaaagatgaaaaccaaacgaacatacacagatacaagcacagcagcaacgatatccaaagctagcagctcatcagataggcaaacaccaagaagctaagctagcgcgccatgcagacgccgaccatgtcgacgtccatggccaccacggcgccagcgaagccccccgcgccgccgcggcaatgctgcaggtacctcctcctcccctccaccggccaccgccggagcgtggcggcatggtctgccaaaaagaagaacccgtggctggacccgttcgacgatgggcccgacgaggagttcgattaccagggcatgttctccggcgggaagcaggaggaagacccgcggccgcccgaggaccctgagaacccgtacgggttcctgaggttcccgcagggctacaacccggagctggacagcctcgcctccaaggtccgcggcgacgtgcggcgcgcgtgctgcgtcgtgtcgggcggcgtgtacgaaaacgtgcttttcttccccgtcgtgcagatgctcaaggaccggtaccccggcgtgctggtggacgtggtggcgtcggccaggggcaagcaggtgtacgagatgtgcaagaacgtcaggtacgctaacgtctatgaccccgacgacgactggccggagcccgccgaatacacgcacatgctcggcgtcctaaagaataggtactatgatctgatcatctccacgaggctggcggggatcgggcacgcgctcttccttttcatgtcgtcggcgcgcgacaaggtcggctacgtttaccccaacgtcaacagcgtcggcgcgggcctcttcctcaacgagatgttcaaggcgccgactaacaacctcgccgacggcgggtaccacatgtataaagacatgctggagtggatcggccggccggcgaagaacgttccccagcagccgacacagccgctgcgggtgtccatctccaagaagctacgggcgtacgtggaggacaagtatagccgcgccggcgtggagaagggcaagtacgtcgtcatccacggcatcgcctctgactccgtcgccaacatgaagtccagaggcgacgacgactgccttcttcccctcgggcactgggctcagatagccaaggaaatcagctccggcgacagggggctcaagcctctgttcgtgatccctcatgagaagcacagagatgaaatcgaggaggaggtgggggacgacacaagcatcctgttcatcaccaccccaggccagctcacctgcctcatcaacgactctgccggcgtcgtcgcgaccaataccgctgccgtgcagctcgccaacgcccgcgacaagccatgtgtggcgttgttctcgtcggcagagaaggcaaggctgttcctgccatacgtggagggcaagagcagctgcaccgtcatatcttcggcgacggggaacctgatcgacatcgacctcaacgcggtgaagaatgtggtgaaggacttggagcccgctcccagcttcgcattggcacagaagtagcagctgcgttccaacatcacccccattgctttgtacatagttcaaacagcagcaacgctagagagaatggtgcagtattacaaactacaaacagcacacatgccgtgtattccgatgttataaataacatctcatatcagctatgcaacgaataaaacttagaacactataatgttatctggtc

SEQ ID NO: 383 - DNA, 1705 bp, Zea mays
agcgataagcaaatctcctccccactttatcgtccacaaagccttcttcccgccctcccgaatcgctccctctctgtccctgcgctccagccgccgccgtcgcctccgccccccgaatcccaatggcgtccgcggccgcccctccaacctccctctccctcgcggcccgcgcggccaccagggcagccgccgccgccgccgccccgctgcgcaggggaggcctcgccacggcgtgccagccggcacggtctctggctttcgcggcgggcgacgcgcggctcgcggtccacgtcgcgtcgcgatgccggcaggcgttctccgggcgtggcacgcgggccatggccaccatggcgaagaagagcgtaggggaactcacggaggccgacctcgaggggaagcgcgtcttcgtgcgcgccgacctcaacgtgccgctcgacgagaaccagaacatcaccgacgacacccgcatccgggccgccatccccaccatccagtacatcctcagcaagggcgccaaggtcatcctctcaagccacttgggtcgccctaagggttttacacccaagtttagcttagctccccttgtaggacggttgtctgagcttcttggcattcaggtgcaaaaagccgacgatgttattggccctgaagttgagaagctggtggcggccttgcccaacggtggggttctgctgcttgagaacgtaagattctacaaggaagaggagaagaatgacccagagtttgcacagaagcttgcctccctagcagatctttatgttaacgatgcatttggaacagcccacagggcgcatgcatcgaccgagggagttaccaagtttttgcagccttctgttgcagggttccttctgcagaaggaactcgactaccttgtcggagctgtttcaagccctaaacgcccttttgctgccatcgtgggtggttcaaaggtgtcatccaagatcggggttattgagtccctgttggagaagtgtgatatccttctcttgggtggtggtatgatcttcacgttttacaaggcacaaggtctccctgttggtgcttcattggtcgaggaagacaaactcgagcttgcaacgtctctacttgcaaaggctaaggaaaagggtgtctcccttatgctgccaaccgatgttgtcattgctgacaagtttgcccctgatgctaacagccagattgttccagcatctgcaattcctgatggttggatgggcctggatattggcccagattctgtcgcttcattcaacgcagccctggatacaaccaagacggtcatctggaacgggcccatgggtgtcttcgaatttgacaagttcgctgtaggaaccgaggctgtggcaaagaagctggcagaactcagcggcaagggcgtcacaactatcatcggaggcggagactccgtcgccgccgtcgagaaggtgggagttgctgacgttatgagccacatttccacgggaggtggcgctagcctggaattgttggaaggaaaggagcttccgggagttgttgcgttgaatgaagccgccactgtgaccgtatgaagcatgctttcattttgtttcgtcttcgtcttcacgtgccgttgtatacttgctacattctcgcttgcacttgcacctcctcagccgctcgcccgaaatgtaagagaccaatgttttatagagctaatggaaatcgtttg

SEQ ID NO: 384 - DNA, 963 bp, Zea mays
aacaagcatcagagctcggtgtcacaaaacctgaccgatggcggcccggtgctccacagctgcctccgtggtcagaacaggatcgcgagacctctccccctccttttccttcacagccgcggcgctcccctcggcgcgtctgaggccggtaggagcgtgggtccgcggtggagggtacacctgcaggctccgcgccgtctgcgccatgggctccgcgccgtcgtcgtcccaatccccgtcgccgcacacgccttcaggacaaacccaagggaaagcagattataaatcactgagtgaagaggagtggaagaagcgcctgactgaagagcagtattatgttactcggcagaagggcactgaaagagcattcactggggaatactggaatactaaaaccccaggcatttatcagtgtgtctgctgcgacacccctctgtttcagtcatcaaccaaatttgatagtggtactgggtggccatcctattataaaccaattggtgaaaatgtcaagagcaagcttgatatgtcaatcatttttatgccccggaccgaggtgctctgtgcaacctgtgatgctcatctggggcatgtcttcgatgacgggccaccaccaacagggaagagatactgtatcaatagtgcatctctgaaattgaagccccaatagttgctggatactttagcaagaagtcaactataacgctggtccgccctatgtaaacttcggggttatgtatataaactactcgagttgtagcatatttattattctctttgttatgtaatatatgtgttcacaaaccgatgaaagtatgaaacaaacagccgctacttcactctggtattctggtctagaattaaggtgttgtttggttgacgaattgtaacgtaaatggcaacggtaatggtttgcactcgagtgacagttgacaacggtaataaatttaaatagatctttattaa

SEQ ID NO: 385 - DNA, 1200 bp, Zea mays
tatagaatcttttaaaatgcaagggtgtcatactcgcagtcgcacagacaagtagataatcgctcgagccatcgagggccagcctgtgctgttggaagcgtggatgcggccgggctcagccgttgatcgttgcgcggtggccgtgagtcgtgtgactcgtgaccaaccaaaccgttcagctcccccatgacgtgtgcgtgacctcactctcagccagagatccacaaccggtgaaccgccgcgaatcctcggcctcgcatccgccggtggccgccgggggcgtggagcaccaacttttcacctgctgtgagacccccactcacctccacggaagcacacacccgaagaagaagagaaggcgagaaccatggcgccacctgccgtgtccatctcgcccatctgctgcgtcccataccccgcctccggcccccgtcgcgctcgcacgcccccctcctccctcagaaggttccccagattcgcagcccggaggagtagcgggggcggcgggggcacgcgcccggagcccaaaccagatgacaacgagagcaaagccgtcctcgacgccttcttcctcgggaaggccttcgcagaggcgctcacggagcgggtcgagtcggtggtgggcgaggtgttcagcgtcgtcgggcagtggcaggccgagcagcagaagcaagtgcaggatttccaggaggaagtagttcaaagagcccaaaaggctaaggagaaagctgcaactgaagtcagtgatgataagggggcgaagtctctaagggaaccttcagcaacaattgtggcgactacaactacgtcatctcccccagctactcccacacagacagaatagttgtagacttcttggtggcagtgaagagttgttgctgcaagttgatgcagttctttgtgcagccaaaaagtctgtagttggctttcacatgatatatgtcgatggatagtatatctgctagtgaaacatccagcatttctagtgacaaacccagcatctcaattataaaaaaaaactaatttacatttttttcatatgaatggaagtactttttgcatctagtgcgttctggtatatgtgtaatatatgttatatgccattcttaagaaatgcagcttcaaaaaccttgggtaagaatatagaattactgtctcgatttatgctattggctgtaatttataactttgatttatgct

SEQ ID NO: 386 - DNA, 1102 bp, Zea mays
agtttccaaactcgcgcatccggtcggctggcgcgtcgtgtggaccagaaagggagcgaaatcctactcgtcgcacggggtccgcaagcttttcgtcgcctcgattcgcttccgccccatcctccttcccgacgcctcacatggcaacggccgtgcccgccgcctgcctccgcgcgccgtgctcctctccagcggccgtcgcacgccgacttggggccggtggcccgtcgctgcgcaagcggcattgcgccgtcgcgcccgtcgctgccgcctgcggccccgcgccgccgcggctgcttgacaacgaggaggcggtctgctccgtacggcggcgtgtgctggttgccggtgccgccgcgttcctctcccggcctaatccggcggcattcgcagcagaggctaagaaagggttcctgcccgtcgtcgacaagaaggctggctactctttcctctacccgttcggatgggaggaagtggctgtgcaagggcaagacaaggtgtacaaagatgtgatagagcctctcgagagtgtgagcgtcaactctattccaactagcaaggaggatatccgtgatcttggtcctccggataaggttgccgaggctctgattaaaaaggttttggcaccatcaacacagaagacaaagttaattgaggcgaaagagaatgatgttgatgggagggcttactacacttttgagttcacagctcaggctccaaactacaccagacatgcacttggtgctattgtaattgcaaatggcaaattttacacattgaccactggagcaaacgagaggaggtgggaaaagatgaaggataggctgcatactgttgtggattccttcaaaatcgaaaatagaatatgagtgcctgaattgctgtgttgtttttccttcgttgattcgctttttcttacataactgcagtgctgagatttttcagtagtaaataccgggattgtggattatgctgatcagtttcatttcgaaatgtttgttaccagacttgagcaacatttgtttgtactttatgtgtataataataatatcttgtttggatgtagatattggagcataaaattgggaattagaatcaatgt

SEQ ID NO: 387 - DNA, 3465 bp, Zea mays
gacgcacggggagaagtcgaacagcggccgcgcgcggggaagttgcccggcggcggcggatctcggaggcagcgacgcgcgggtggaggagctcagtgacagcgccagtgcctatcgagcgagcgaatcgaggagattctccccactgtttctttcctgctgattccgatttcgcgttgaaacaccggggggagaagaattgcgggcgaccataactcggcaagaagcggctccaaaaagggcatctacctttgccgattccggcaccgatggatcccgcggcgtcggggaggttcgacaagctccagagctcgttcaagctctccatccagtgcctcctcaccgcctgctcccgcgaggatgtcaatgacgctttctcgtccttcactgatgctgagaaggagcgtttgcaccggatgctcacccttgtggctgctgcccttgaaaagatagatgactttgttgaaaagcagaatcttgatgcattatcttcagagaagactactgttgaagaaatcgaagaaaaggtatcaagagcaaaaaaggatgaaattgaatatttgactggtttactgaaaaaggttgaagaaagtaacaatgccaagaaagctcgaattgaactcctgaagaaagaggaggatttaactgctgcaagagatgtcctcaataagatgacgcagtggaactctgcactcgtggagaacattaacccttgaatctgtgtgatgacgattcattggcgtcaaaggacatctttgtataggggtgtgttagattggatgacatgtgaatgtgattcatggatcagcctggatgttctgttatgattaagaactgctatgtatcgtgcaatagacacatcgtctgtactttggatgttattatcaggtcccaaacttcattatatccaatatgttacaatatcattttggtgacttaactacaatgtcagctcgtgccaacagaaaaagaagaaaagaaatgggcggtggttgcccgacaagtccttgtcagccgcacagtcttcacacgaccaggggccatgagcaccactcttgccttagccacggcccacgggcagcacagcatctccatctatccaaatggcagccagcagccgtccccttcctccaccctctgccatcctcgcagtcacagcccctcaccatggctgccacactctcctccgtggctgccccttccctccccaagcacatccccgttaccagagctcagcagcaggcgcctccttccatcatctcggcatcaactgtgagtagggatgctgcttttatttctgtggtttgtttcctgtgatcgctgatgttcgtatggacgtatggtgcagcagaagactgccttccatggggtgtcgctggtggtggacaggaggtgggcggccggccaccggagaggcggcggccggcggaggctgctgcaggtgaacgcgaggaccgccgccaagaacatcgaggtggaggtcgagaagccgcttggcttagccttgggccagaagcccggtggtggcgtcgtcatcactgtaagccctctctccacttccgtttccattgcttcctgtgcttgttttttctcttcttttttcttttgtttcacaggaaaggtttccatcgctttattttattgatcataaagagttcatgacagttaagttccagcgaatcaaacagaaaaaggccttaaaagccaacagcaccactacccgaacacattttgattactttgggtcaccatcgagtcttcattcgtgtgacgaggagcatctaaacattggccacacaaggatcagaaaacagatggcaaatagactccctctcactacagaaaagacaggactggtccaaggcttctcttctcttagccaaattatacctagtataagtaacttgttcttagttaacaacaatctgaatcccagtaattttccaaactgcatggacacacaccgctataactcctctattgctgatcaccgcatgcaaagatcgcactgagtatctaccattagagctaaagctccaaatcatttgaccttcctcctcagatttacttcacccctttcattatctccagcaattcacaccagagctgcatgactctttcagacacattcctcctcaaggagagtttcagaacctccccatcccaaacctcgtcaatggacttaccatgctgttcatttataatatatataatggccaaaactgaatggccaaactggagttaccaaaccacaacaacaaagcctttgatcctcccccaaaacgaattttccccatttccaaccttccacataatccccatttcagcagcctgtatagcccacaacacccctttccggaagaggaaaaacatttagtctgttaggccctgtttggttcttctgactcaattttagtccctatcacatctgatgtttgaatgctagttagaaatgttaaatatagtctaattatacaggagatgactaaacggtaagacgaacctattacacctaattagtccatgattcgctcgtgtgatgctacagtaaacatttgttaattatagattaattaggcttaataaatttatcttatcgtttagtcttcaattgtttaattaattttataattagattatatttaatatatttaatggacattcaaacatttagtgtgacaaactttagtctctggaaccaaacactcccagtcataacctatggtctacaatcttagtccaaacagtgtgattctctgaatctggaggcaagtattgcgaacggtaattattttatgattgacttgttcctttggcatgggattattagtctgtggagtctggagggaatgcagccagagccggtctgaaaaccggggaccaggtcctgtacacaagcagcttcttcggagacgagctgtggcctgcggataagcttgggttcaccaagacagccatccaagcgaagtcagactccgtctacttcgtcgtgagcaggggtgccgaagttgacgtgaagcgcctacctaagaggccggcgccaccccggtttggacggaagctgactgattcacaaaaggagagagcaacgcacgtctgccttgattgtgggtacatatacttcctacccaagccttttgacgaacagcccgacgactacggttgcccacagtgcaacgcgccgaagaagcggtttgcgaggtacgacgctgccaccgggaaggccatcggcggcgctctgccgcctatcgccgtgatcgtaagtttggtgatcggcatcgctggggtaggagctctgctcgtgtacggcctgcagtagcctgctcgttcttgttcagaacctttttttttttttgctgtgctcaagaagctcagctgactgctgctgtactctgtctcacaagacattccgagtgatatacatacataaaagggaagaaggaaatacacagtatttgaggctaa

SEQ ID NO: 388 - DNA, 1834 bp, Zea mays
caagcgagcaatacaaaatcagcgagcaggcgggctggcatcggccggttgcggtggcatccataggactctcagattcccatctcgtcttcttatctccacttctccctccacacacatcccctcctctctctcctctgtttataaaactcgccaggcgcaatctctctcgctccgtccatccccgtcgccagcatcgcttccacttcggtctcagcgacggtcgccaccaccgctcccctccctctccccctcctcgcccagcggcaattaccacagcctccccagcaagccgggatggctgcactcaaggcatcgttccggggtgagctcagcgccgcttccttcctcgactccagcaggggacctctcgtccagcacaaagtggattttacgtttcaaaggaagggcaaacgagctatttcactgagaaggacatgctgttctatgcaacaggctccaccaccagcatggcctgggcgagctgttgctgagcctggccggaggtcatgggatggcccaaagcctatctcgattgttggttcaactggttccataggaacacaggtaaagggatttatcgaatactcatcactaatattccatcttttacataatgcaaagacattggacattgttgcggagaatcctgataagttcagagttgttgctcttgctgctggatccaatgtcacgcttctagctgatcaggtcaaaacattcaaacctaagttggttgctgtaagaaacgaatcattagttgatgaattgaaagaagccttggctgattgcgaagagaagccagaaattattcctggggagcaaggtgtcatagaagttgctcgccatccagatgcagttacagttgtcacagggatagtaggttgtgcagggctgaagcctacagttgctgcaattgaagctggtaaagacatagcattggcaaacaaagagacacttattgcaggtggtccttttgtgcttccccttgcacacaaacacaaagtgaaaattcttccagctgattctgagcactctgcaatatttcaggtaactcacaaaatggactggccagttgacaggctgaaagatgtaaaagttgctgacgctttaaagcatccaaactggaatatgggaaggaagatcacagtagattctgctactttattcaacaagggtttagaagttattgaagcacattatttatttggtgctgaatatgatgacattgagattgtgattcacccacagtctatcatacactctatggttgaaacccaggattcatctgtcctagctcagttgggatggccagatatgcggttaccaatcttatacaccttatcatggccagatagaatctattgctctgaggtcacctggcctcgtctggatctttgcaagttgggttcactgacattcaaagctcccgacaacgtaaaatacccatcaatggacctagcctatgcagctggccgggctgggggcaccatgacaggagttctgagcgctgctaatgagaaggccgtggagttgttcattgacgagaagattagctacctggacatattcaaggtggtggagcttacatgtaacgcgcatcggaacgagctggtaacaagcccgtcactggaggagatcgtccattacgatctgtgggcgaggagatatgcagccagtctacaaccatcttctggcctgagccctgtccctgcataataggtcgtcacgacaacgttgtacagcaggagttctaagatatgatgtgtttgtggctcctgtttccatgttcaattttcaggcctccacatgaataaaatgcatctattccatg

SEQ ID NO: 389 - DNA, 2265 bp, Zea mays
actcgcactactcgccctgctcgtcgtctccccagtccccaccagttgccttcgcatcgccggacgccgctcgccctccgcttctgcgactacgtccgagatggccgcctcggcattggcctcccgcgcgctgcggcctccgcacggccgccaccctcccgccccttcgccgcgtccgcgtccgcgctcggcaaccgccgccgctccaaggacgcgctgccgcgcggtggctgcggacgagcgccccgccgaccccgcgttccccgagcgccagaaccgcgggatttccgggcttcgcctcctcatcgcgtcgcagttgtcgaccagggcggtggagaggccggaggcggacgtggttgtgataggcagcgggctcggcgggctgtgctgcgccggcctcctggcgaggtacggccaggacgtgctggtgctcgagagccatgaccgcccgggaggcgccgcgcactcgttcgatatcaagggattcaacttcgattcagggccatccttgttctccggattccagtccagaggcccccaggcaaatccacttgctcaggtccttgatgcattaggcgaatcagtcccttgtgcgtcttatgactcttggatggtttatgtacctgaaggacaattcctctcacggataggaccaactgaattcctcaaggaccttgagatgtttgttggtgttgacgctgtccaggagtggaaaaaacttcttgatgcagttattcctatgtctgcagctgcaatggctttgcctccgctttccattcgaggtgatctgggcattatatctacagctgttggtagatacactccttcgttgttgaaatcattcatacaaatgggaccgcaaggagctctgggcgctacgaaacttctacgtccattcaaagaaattgttgattcgctggagctgaaaaatccatttgttcgtaactggatcgatcttctgtgctttctacttgctggagttaaatctgatggtgctctttctgcagaaatggtttatatgtttgcagaatggtacaaaccaggatgcttgcttgagtaccctctgggtggaactggagcaataatagatgcccttgtgagcggtattgaaaaatttggtggcagacttgctcttcgttctcatgttgaaaagatcttaatagagaatggtcgagcagttggtgtcaagctacaaagtggacaagttatccgtgcaaagaaagcggttgttagcaatgcatctatgtgggacactttggatctgttaccacccgatgctgtcccaaaatcatatgaagatagagtgaaagcaactccacaatgtgaatcgtttatgcatctccaccttggttttgatgcagagaatgctagagaggaccttgggatccatcacattgtggttgatgattggaacaaaggagttgatggtgaacaaaatgttgttttgatatccgttcccagtgttcttagcaaggacctggcaccgcccggaaagcacattcttcatgcatatactccagggacagaacctttcagtttgtgggagggactggacaggaaaagtgcagaatatcgaagactgaaggaagaacgttctgaggtgatgtggaaagctgtggagcttgctctcggcccaaaatttagccgcgaaaaatgcgacgtgaaattggtcgggacaccgctaacgcacaggagatttctccgaaggaacaggggaacctatggtccagccataaaagccggagaagccactttccctgggcaagcaacaccgatcccccagctcttttgctgcggtgactcgacctttccagggatcggagtgccggcagttgcggccagcggcgcgattgtggcgaacacgctggttccggtgtcgcagcattcagagctccttgacgctgttggaatctgagtggcagatacgtccgtcggtcctgaacgataatcaaagattttcccactgctgttggaaaaagatcgtatggctgaatggagaagaagacgacgacgacgaccgatacagtagagttttctagtcagaacggagactgggaaaatatgttgtacagtatattatttactacgactgcatgaagcttgtgctgcttctgacaaattggtcgcctcgttcgcctgcatgctccttgtattgttctaccgaaagctctgtggcgcatgcaggccttttgtcggacattttttttttctggtatacggaggaaggaccatgtgcttgtttgtacaactctagtcgcagtttgc

SEQ ID NO: 390 - DNA, 1191 bp, Zea mays
ccgtgacgagcccagcgccacacaccaacctcagcacaccaaggagagtacgtggaggagcagccatggcttcatcggtggccgccgcggcgagcacattcctgggcacccgcctggcggacccggcgccacagaacgggcgcatcgtggcccggttcgggttcgggttgggcggcaaggcgaagcctgctccgaagaaggtggcgaagacatcgacctcctctgaccggccgctgtggttccccggcgccgtggcgcccgactacctggacggctcgctggtcggcgactacgggttcgacccgttcggtctcgggaagcccgtggagtacctgcagttcgagttggactcgctggaccagaacctggccaagaatgaggccggcggcatcatcggcacccggttcgagtcctccgaagtcaagtccaccccgttgcagccctacagcgaggtgttcggcctccagcggttccgcgagtgcgagctcatccacggccgctgggccatgctcgccaccctcggcgccctctccgtcgagtggctcaccggcgtcacctggcaggacgccggcaaggtggagctggtggacgggtcctcctacctgggccagccgctgccgttctccatctcgacgctcatctggatcgaggtgctcgtgatcggctacatcgagttccagcgcaacgccgagctcgacccggagaagaggctgtaccccggcggctcctacttcgacccgctcggcctggcggccgaccctgagaagaaggagcggctgcagctggcggagatcaagcacgcgcgcctcgccatggtcgccttcctcggcttcgccgtgcaggccgccgccaccggcaaggggccgctcaacaactgggccacccacctgagcgacccgctccacactaccatcttcgacacgttcggagggtcctcttaagcccgccattgctccgccccgtccatcgaccggaacgtgttcttggattaattaactacgatctctatgagcctggggatggatcaacccgtcgtgcgtggtctcgttttgtgatgagtgggagagagaggatgacaagatcgatcctttgttaatggagatctcgttaattaggagagctaccgctgggacttggtggtttgtaatatatgatccaaccagtgatgaatcaatgcattcacttgtgtac

SEQ ID NO: 391 - DNA, 1109 bp, Zea mays
accaccccattctccagcaacgagacaacaaatctcctcctcttcctctccgtatccgcatcagtccatcaccttcaatggcggcggcggcggctgctgccacctccttcaccaccctcgccgtcgcgcgttcggcggggcagcggtccctccttgcctccaaggccgcaccttcgccgctcctctccctccgtggcgcccgcatcccctcgcaggccgtctccttctccgggggccttgcggcgtcgccctctcacagccgcgcgcgcttcgctacatccgccagcgccgagcccaaggaagcagatcttcagtctaaaatcaccaataaggtgtattttgacataagcattgggaaccctgtggggaagaatgttgggaggattgtcatcggcttgtatggggatgatgttccacaaacagcagagaactttcgtgctctttgcactggagagaaagggtttggatacaagggatccagtttccaccgtgtcatcagcgactttatgatccagggcggagattttgacaagggcaatggtaccggtgggaaaagcatatatggacgcactttcaaagatgagaacttcaaattggttcacactggacctggagtggtcagcatggctaatgctggaccgaacaccaacggcagccagtttttcatttgcactgtcaagacgccttggttggatggaaggcatgtcgtgtttggccaggtcgtggaagggatggatattgtaaggctgatcgagtcacaggagactgacagaggtgaccgtccgaagaagaaagtagtcatcagcgagtgcggggagcttccagtggtctaagcgttactcatctgttgtccgtttcacttctgacggatgacgatatcccccccccccccccccccccccccccatcccatgtgctaattatagagaatatttcgaattcaagtaaggtcccaaatctgaggcatactgttgctgccctgctggaataaatgtgctactttcccctgccttgttaagggaaagggttttgttcacgatgttaccttgtaaccttgtacttatgtttcatacttggaatgaaggttcatggaacaaaaatattctgct

SEQ ID NO: 392 - DNA, 2137 bp, Zea mays
acaaattgtgtgtgccttggcgtgtcgtggaggccccgggcacgcacgccgcacagtggcatcagctctcagtgcgcgcacgtcaccacaaattgtgtgccttgtcgtggaggccccgggcacgtacgccgcacagggcacacctgctccctccggcctgctctgctcactgctttgattccgcttcggcgcttcgccgcctccggttttctctccgcgcctccagtctccagggacgcaccacctctcccaagtcccaatctcccatggcggcgctgggcacggcgatcacccccgcagcagctaccacggcgccgtgctgctataatcggcatccgcggagccacatcacggcgcgccgtaaccgggttgcctccgcgaggaggcttgacctgtgcgccagctcctcacctgccgtcaccgctcccgacataccagacgaggcgctggtgtttgaaatggcaaaaacttatttgaagccaacaattggagggactattgttgatgcaagttgtggaagtggcctgttctcaagattatttattaagagtgggctatattctcttgttgtggcactggatttctcagagaatatgttgaagcagtgcaaccaatacatcaagcaggaaaacatttcagatgagtatgcctttggtcattatgtttagttttgtaccttattcattaggtttagttttgtaccctacttgtcatgtttgacttattaagggctcggagtttggggattttgtttacttaccatccattggtactagaggtggtattctggatcattctgtgtcagtctgttttatgaaggaaaacagcaccaccttgtggttctcgggggtctacggcccccatagagatgaggagaaattggcttttctagaagaactttctcaggtcagaaccagttgccctggtcctgggtgattgcaggggacttcaatatgatccgttgtgctgaggacaagaataattcgaatcttaatagagctctcatgggtagcttaaatatttggattaataatcactctctcaaggagttgcctctaactggaagaagattcacctggtccaaagagatgtccctaccttagtcaagcttgacagggtgttctgcacttctgattgggaggccttattcctagattgttctctgcagagtaatgcctctagtatgtttgatcactgtcccctggttctgaggcttaatgtgggctttaagggaaagaagcgtttccactttgagagtttttggccaaagatgcaaggttttcaggaggtggtgtctgattcctggaactctagtatttcggttttttttgtcccatggagagattatctattaaattcaaaagacttgcgaaggccctgcagtcctggagtcaaaaatatgtgggagattagtattggtgagggctgacatatctagactcccttttgtgagtggttcaattgacgctctgcatgcaggtgctgcaattcattgttggccatccccagcttgtgctgttgcagatatcagtagagtccttcgcccagggggaatttttgttgcttcgacattcgtggcagatgttattccaccagctattccagtattgaagatcgtacgcccgtacattagccaaataactggcaacaataccttcttatctgaagtggagcttgaagatctttgcaaagcatgtgggctggttgatttcaaatttgtcagaagtggattctatataatgttttctgccactaaagcatgctaactaagtagcagcaatcgtccagtcgtttatgtcaagactcctcggttttatactgcaaatggtttccttctgtgcattgtgcggttgtgccatttgctctaaaggttgccaactttcctcaagggggtgtggtgtaaatagtgaacacatatattttacttctacttgaccgacctcattatagcatgaaaatatcatattttttgtgtacagcttcatagatctttgcaattatgtaatttaaggcttgtttggaacagctctaccaacctaaaaactgaatctggatatagaatttagttagatccatggtgaagcagctccaatagttaatggagctgatgatggtgtttgttacagctccatctgac

SEQ ID NO: 393 - DNA, 1483 bp, Zea mays
aagatcaagccaccaccaccgccagcaagagcagaggcgagaccgcgagagtgtacgtgccaccaggagcagcagcagcaatggccgccgccgccaccacctcctcatcctcccacttgctcctcctctcccgccagcaggcggcctccctacgatgccgcctctccttcctcggccagcccgccagaaggtccggcagggtcacggcccaggcgccggccgctaaggacgtgcggtgcatggcggccgtggacactgcggcgtccgcggcggcggcggagacgagccccaagtcgagcagctacgagatcgtgacgctcacgacgtggctgctgcagcaggagcggaccggcgcgatcgacaacgagatgaccatcgtgctggccagcatatccacggcgtgcaagcagatcgccgcgctggtgcagcgcgcgcccatctccaacctcacgggcgttcagggcgccgtcaacgtgcagggcgaggaccagaagaagctcgatgtcgtctccaacgaggtgttctccaactgcctcaagtcgagcgggcgcaccggcgtgatcgcctcggaggaggaggacgtgcccgtagcggtggagcagagctactccggcaactacatcgtcgtgttcgaccctctcgacggctcctccaacatcgacgccgccgtctccactggctccatcttcggcatctacaaccccaacgacgagtgcctcgccgacgtcgacgacaacgacacccttgattcggtggagcagaggtgcatcgtgaacgtgtgccagccggggagcaacctgctggccgccggctactgcatgtactcgagctcggtgatcttcgtgctcaccgtcggcaccggggtgtacgtgttcacgctggaccccatgtacggcgagttcgtgctgacgcaggagaaggtgcagatccccaaggcgggcaagatctacgccttcaacgagggcaactacgcgctctgggacgacaagctgaagctgtacatggacagcctcaaggagcccggcgactcggggaagccctactccgcgcggtacatcggcagcctcgtcggcgacttccaccgcactctgctctacggagggatctacgggtaccccagggacaagaagagcaagaacggcaagctgcggcttctctacgagtgcgcccccatgagcttcatcgtcgagcaggccggtggcaagggctctgacggccaccagagaattcttgacatcacacctacagagatccaccaaagagtgcctctgtacattgggagcgtggaggaagtggacaaggtggagaaattcctggcttgaatgccagagctctctcatcagatggactcccgaagacatcaagtttagggagggaatatacatgtactctctctttcccaccccaaataagtcttcttcatctcatatttcgataaatcaaacaatctcaattttgatctaatatatatacacacacaaca

SEQ ID NO: 394 - DNA, 642 bp, Zea mays
atggccatggccatggggcaccgccagtcgggcagctgcgcaaaggtgaggcccggcggcatcggcatcggcattggcatgggcatggtgtccaagcagcaccaaagaacaccgccgccgtcctcttactgtctacacctccaccacatcctctaccttagacctgtcgccagcagccaccacttgacgcgccactccgtcgacgtcaccaaagacgacaagccgcttgagccgctgccgccggcggctgcagagacagagagcacgcagcagcaggaggacgaggatggcgggccaaagctggacccgaggcggttcgaggagaagttcgcggtgctgaacacgggggtccacgagtgccagtcctgcgggtaccgctacgaccaggcggcgggggacccgtcgtacccagtgccgccgggcctccccttcgcgcagctgcccgatgactggcggtgccccacctgcggcgccgcgcagtccttcttcgagagcaagagcgtggagatcgccgggttcgcgcagaaccagcagttcgggctgggcggcaactccctcacctccggccagaagggcctgctcatctacggtagcctcctcatcggcttcctcttcttcatctccggctacttcctgcaatga

SEQ ID NO: 395 - DNA, 829 bp, Zea mays
atcctccttcgcattgctgggccttagcatactgtcaggctaccagcaagcgaagtagctagccatgctcggcctccccgccgcgcccccggccgccgcagcaccgccgaacccgaagggcaaggggcgatgcagcgccgccccgccaccagcgatgacaggccgggtgtctctggctgtccctgcggcggctgtctcgctctcgctcttcctctggtccagtccagtgaacgccggcatcctgtccggtttctcgggactggagtcgactcccggccccgacctcccccggctcgagttcctggagaaatggaatgcggagaaccagaagaagtacaccgagttcgataacaggttcaagaagtccaaggtgctgcaggacctgctcgagaagagcaggaagaacaaagagaagaacgagaggatgatccaggacaagtactgtctgcggggcgccgagtggggcgtcggggactgctccacggagggcatgtcagaccaggagagggaggacttcatttcggagctcaagaagagagctggagcagagtagcgagctgaggacgtcattcagtttcaacagacgaagtatgggcacacttcgccactgtagcagtccagggaatggccattttactcgtcataccctgattaccaagggaaatacgcaaacaatgtagaccagcccataggccactgggagtgcgagaatgttcaccaacatcatgcgagctcagaatttgcaatacatatgtacccattgtaaaatgcatttagcacgagcaaattaccagctacactgattcttaagatccctaaattcctctta

SEQ ID NO: 396 - DNA, 1166 bp, Zea mays
cccatcagccatccccttttgctgcaaatctttctctgaattgtgggtctccgacaatggcggcgctcgctccatccaagattctgggcacccagctcaacttcgcgggctcctcccgctacgccaccgcagcgcccaccgcgggggctcagaagattgtctcccttttcagcaagaagcctgcccagaagcccaagcccgctgcggtatcgtcgtcttctccagacatcagcgacgagctcgccaagtggtatggtcctgacaggaggatctacctgccggatgggctgttggaccggtcggaggtgccggagtacctcaccggagaggtccctggagactatggctacgacccttttggcctgggcaagaagccagaggacttcgccaagtaccaggcctacgagctgatccatgccagatgggccatgctcggtgccgctggcgctgtcatcccagaggcctgcaacaagttcggcgctaactgtggccctgaggctgtctggttcaagaccggcgcgctgctcctggacggcaacaccctcaactacttcggcaacagcatccccatcaacctggtggtggccgtgatcgcggaggtcatcctcgtcggcggcgccgagtactaccggatcaccaacggactggaccttgaggacaagctgcaccccggtgggcccttcgaccccctgggcctggccagcgaccccgaccaggccgccatcctcaaggtgaaggagatcaagaacggccggctggccatgttctccatgttcgccttcttcatccaggcctacgtcaccggcgaaggccccgtggagaacctcgccaagcacctcagcgaccccttcggcaacaacctgctcaccgtcatctccggcgccgccgagaggacgcctagcctgtaaggacggacgccacgccgccgagcaatgccaagtcatgcgctgctgcatgccgtctttgattttaccgggataaaaagctgtatgtgagggtctgaagaatgtgcaatgcccacgcgtgtaaattatcgagagggggaacaaaccttttcattctgattgtgatatgactgctgcttccattggtgcctgagacatgctacttacttaagttaatttgtgttttaggatcagtttggtacatctctcatttctaattct

SEQ ID NO: 397 - DNA, 1395 bp, Zea mays
accaggggaaaaagtaaagagataaacggatagaacaggcgtggagcgcgcgaccccgtacgtctccaccgctgcaggaactccccccctccccggcggcccgcgcgcccaccaaccatggcagtcgcagccgccgcccaccacctgcccgttgtgccgcaccgccttgtcccggtccggcacaccagtagcagcccgccgccgcatccggcctcccgctgctccgccgcggggaagccgcccgtccagctccacgcggcgcaagcgagggcgtctgggttcgccgcgcgcgtcgcgttcaacccttccgggaactacgacctgtccctctccatgggcgaagacgagaccccgcaggtccagcctccgccgccgcctacccaagggcgcttcgaaatcgttatcaacaacgacaacatccgaacgctcgacctatcgccagtcgaagcagcactcggcgacttgagctccttgacaccagctgcttcaagaaccctgctggaccagaccgtcgggttcaccatcagctacgagagggaggacgagtacgacacgcgggagctgtcggagttccccgacatacggctgtggttcgtgaggctcgacgccgcgtacccttggttcccggtcgtgctcgactggagagccggcgagcttgccagatacgccgcgatgctcgtccctcaccagatgagcatgcggatgggcgtcgtcttcaacccggaggcgctggagctgttcgtgatgaagaaggtgttcgccgtcgacgcttggctgaagcagcagagccatcccaaaccgaggctgaagacggcggacatggcaaggatgctcggcttcggcgtcggagatgagctgttcgacctgatcgagaagtaccctgtccatcgttcgtgataaaaaaataattaaacaacaaagctgagaatagggatccgatcccacacacagaagaatcagtcgtctggtcggtgctgctgcctgctgctcataccatacccacacccttgaagtagaaactaaggcacgtttgctttgctccaggagaccaggagcgctctgatgttgtcgtgttcctcgcgtcgccttctcggcctgttgtactcagtagcgccgcagagtctctagcatgagacgacctcgaggagtctatgttgtcgtctatggatggaacagtcagcatagaccaaggccgtgacctttcctccggtgctagccctttcgcatgtatcggataaatttggttctgctaatcactaccaaaatttagctctttgccgagtgtcatattctttgccgattgtttttttttgcactcggcaaagaagctctttgccgagtgccacgcaaaaaactctcggtaaaagaaaacactcggtgaagaagctctttgtc

SEQ ID NO: 398 - DNA, 1369 bp, Zea mays
caaatacattgaggatagcacgagaaaggggcgccaagcaaaccgggtcggccagcagacactgccatgaggactctactaccggtggccgccggccgcgggaccgtcgcctgcgcggccacgcccgtcccccggaggtcgctgctcctctccaccgctgccgcaggtgcggcgctgcagccggagcaggtggctggaacgaggccgttgaggctgaccaggagcgaggccagcgccgtggcaaagcccaggacctcggccgacgaggccatctcctgggcgaagaaagacaaccgccgcctcctccacgtcgtctaccgggtcggcgacctcgacaagacgatcaactcgtcggcccggccctgctggtctgatgatccaataacgcagtgcaggttctacaccgagtgcctggggatgaagctgctcaggaagagggacattccagaggagaagtacagcaacgcgttcctcgggtacgggcccgaggaatcgcatttcgtcgtcgagctcacttacaattacggggttgacaaatatgacataggcgaagggttcggccatttcggcatcgcagtcgaggacgtggccaagacagtagagctcataagagcaaaggctggaaaggtcatcagggaggccggtcctgtcaagggcggcgagaccgtcatcgccttcgtggaggaccccgacggctacaagtttgagatcatcgagaggcctggaactccggagcccttgtgccaggtgatgctccgcgtcggcgaccttgaccgtgccataagcttctatgagaaggcctgcggcatggaactgctccggaagcgagatagccctgagtacaagtacacagtggcaatgatgggttacggccctgaagacaaggacgcggtgctggagctgacctacaactatggtgtcaccgagtatgccaaggggaatgcatatgcccagatcaagcagatcgccattggcaccgacgatgtctacaggaccgcggaggcggcgaagctgtccggaggccaggtggtgcgggagccggggcccttgccagggatcaacaccaagatcacagccatcctggaccctgatggctggaaattggtcttcgtcgacaacatggacttcgccaaggaactggagtagccacgccaacgacctcggacgccctgcaacaggattaactcgcactgctgttggagaagaacaggtggttcaggaggagccacaaggcgaggagtatgatctgatctaggtggcgtttctcagttgacattggcgccgacgatccttagttcgttttacatttattcttttattttgtaataagtcttccgctatgtaataaatactctaatgttttatgaca

SEQ ID NO: 399 - DNA, 848 bp, Zea mays
aaataagaactcaaattattttgattcaaatttgacatatatggatcactctttgccaccacttggtttgtttttgaaaatcaaattcaaatttctatctctaagtcaaacacacatgttaagacataaagagagtcattccaagagaaattgattcaagatttcaaaaactcccctttttcccataatcaatacttctccccacaagaagccaacttttgacaagagagacaataaaagagttttgacaaaccaaaagctctattctactattttcaaaatctctcaagtggtagctgatccatttatcgctttggcctttattttctccccctttggcatcaagcaccaaaacggggtcaatcttggccctttaaccccattgcctcaccaaaatcttcaaataagaacacaaaggcaataagagtataaagatgaacttggaaaagttactcttttcagcggagtgcagtggaagtcttgcatggtccaagtacaccttttccctttcaatcctcttttgagactaaaaacagccaaactcaagtacatggttagtctcaaggggtcaagttgtagcacagctccccctaaatatgtgcatcacttgcaaaaaggacttgtgaggtccagggagtgtttgtacaacttgagcaccacaataagcaacaaaatgcagaatgaacatgatcaaaggcataaacacatgtatgctacaattcaatccaagttccgcgaatctaagatattgagctcactacgcagcctgcaaaaggtcttctcatctagaggcttggtaaagatatcggctagctggttctcggtgctaacatgaaacacttcgatat

SEQ ID NO: 400 - DNA, 1236 bp, Zea mays
gatggccctcatgaaaatcacaaattgagagagggagaagggggtgggggttacgtaacacggcgattcaggaggggatagcatcgtcatcgcaaaatgcaggctctcctgctccccgcgcgggccgcgccgccgacgccggcgatgcttcggcagcgtgcggtttctgcctccgcgtgtgcgtcgcaggtctgccgccccctattcggtgccgccagttgcatctcctgtggggtccacggaagcgttcggcggcacctcacagtggcggtggcggcggccccgccctcgccttcgtcctcaccttcgtcgggaccgctctacccgacgcctccacccaccgagcaggaggtggagagggtcaagctcgagcaggttatgaggagactagagaaaacagcaaggtatttcaagaatttgggtaccctggggttctggtcccaattggtgtgcacaattatttctgctggaattttggcattctctacagttgtaacggggaaggtgacatcaccctttacattctatgcaactgctgctggtattgctgctgcttttatttcagtcttctggtcatttggttacatccgtctctctgaaaggcttagaaaaacatccaaagaacctgctaaggctcctccacgtgctgatgttgttaagagccttaaaaatggcatcgtggttaatattcttgggatgggcgctgctgttctcggcatgcaagctactgttggtgctttggtagcaaaagctctcacaacctctgcagtaccctattatcaggctgctggccaaagccctgtcttggctttagatgttttcctagttcaggcttcagcgaacaccatcctgtcgcatttccttggggtggcgagctccctggagctgctgcgctcggtgtcactgcctccagcagaagccgccgtcccggccccggcccctgcacgggcctgagccatggcccgttgggcaggtcaagaaaaaccttcaatccttggctttggctctagacagttgctatttcttgattgcatgtacaacttgcatcaagaatacatacacatcgatgccttccagttcacctggacgcaacatgttcgcgtaattcccgccgagtgtgagctcttgcatgagcactcgcgaaccacatgtggcgcttgtttgctgtgcaagtgcaagtgagtgcagtgaccggctctcgctcgttcttaatcattgtacccgtttcgctggtct

SEQ ID NO: 401 - DNA, 1670 bp, Zea mays
acaaacccttcttatcctatcgtcgcgcgcgcctgcctctcccacacactccacagcgcccgcgcaggctcgctgcaagcgcaaagcagccacagcaccccctgcacctgcagactgcaaccgcaatgtcggctctcgggacgctctccggcggcgctgccggtgtctccggcctcctccgcctccgccgccgggccgccccagcccccgcgatcgcggcgccgtcgcacctccccgctgggaccgtcaagtgcgcggccgccgtgcccgatgccgccccgatcgtctggggccgtcagctccgcccggcgctcctcctacccgcggcgctgctcccttcgttgcagcccgccaggaggcacacgctgcagccgcccgccgcagccgccgagtccgcaggggaggccaagtctgtgggtttcctggagaagtacccggccctggtcaccggcttcttcttcttcatgtggtacttcctcaacgtcatattcaacatcctcaacaagaagatctacaactacttcccatacccatactttgtgtccttgatccatctagtagtgggtgtcgtatactgcctcatcagctggagtgtcggtctccccaagcgagcgcctatcaatggcacgctcctcaagcttctctttccagtcgccctgtgccatggtattggtcacatcactagcaatgtgtccttcgctgctgttgcagtctcatttgctcacactatcaaagctctggagcccttcttcagcgcagcggctactcagtttatccttggacagcaagttcccttctctctgtggctttctcttgcccctgtggtcattggtgtttcaatggcatcccttactgagctttcattcaactggactggcttcatcaatgccatgatatcaaacatctcattcacttacaggagcatttattccaagaaagctatgactgacatggatagcaccaacgtgtatgcttacatctcaataatcgctctaattgtttgcattccacctgcattgatctttgaagggcccaagctaatgcagcatggatttagtgatgccattgcaaaagtaggtttgacaaagtttgtcagtgacctattcttggttggactgttctaccatctgtataaccagattgctacaaacaccttggagcgagtggctcctctgacacatgctgtcggcaatgtgttgaaacgtgtttttgtcatcggtttctcaatcattgtttttggcaacaaaattagcacacaaactggaattggcacgtccattgccatagctggtgttgctatgtactcttacattaaggctaagattgaagaggagaaaaggaaaaagagcgcatgactgctgtgaataatattatcgggaccttcctcggacacaacatcgtcgacaatcacgacctacttctataccttgttttgttttcatcttgagtcagtcggtccattgtttgttcccagtctggtgattaaaagtctgcaaattctgtttgtggaattggcagcgatacaaatttggcttctttaagtaaatccggttggcggtacacagcggtattaattcacctgtaactgaatggaataccgtaatgcaaagggcacaacactctgcctgactaaaataaaatggtgaaggttcacccttgttgtggttgct

SEQ ID NO: 402 - DNA, 1205 bp, Zea mays
cccatcagccatcccctcccgcggcaagtctctctgaattgtgggtctccggcgatggcggctcttgctccatccaagattctgggcaccaagctcaacttcgccggctcctcccgctacgccaccgcagcgcccaccgcgggggctcagaagatcgtctccctcttcagcaagaagcctgcccagaagcccaagccctctgcggtgtcgtcctcttctccggacatcagcgacgagctcgccaagtggtacggtcctgacaggaggatctacctgccggatgggctcttggaccgctcggaggtaccggagtacctcaccggagaggtccctggagactatggctacgacccttttggcctgggcaagaagccagaggacttcgccaagtaccaggcctacgagctgatccatgccagatgggccatgctcggtgccgctggcgctgtcatcccagaggcgtgcaacaagttcggcgctaactgcggccccgaggccgtctggttcaagaccggagccctgctcctcgacggaaacaccctcagctatttcggcaacagcatccccatcaacctggtggtcgccgtgatcgcggaggtcgtcctcgtcggcggcgccgagtactaccggatcatcaacggactggacctcgaggacaagctgcaccccggtggccccttcgaccccctgggcttggccagcgaccccgaccaggccgccatcctcaaggtgaaggagatcaagaacggccggctcgccatgttctccatgttcgccttcttcatccaggcctacgtcaccggcgaaggccccgtcgagaacctcgccaagcacctcagcgaccccttcggcaacaacctgctcaccgtcatctccggcgccgccgagaggacgcccagcctgtgaggacgcgccacaagccggcagcgatgccaagtcatgcgctgctgccgtccttgattttaccggggaaagagctgtgtgtgagggtctgaagtgaagaacgtgccatgcccatgcgtgtacattatcgagagggggaagaaaccttctcattctgatctctgatatgactgctgcttcagattgcgcctgagatatgctaagtttttgaaagctaattagttcgtgcacattaagggtgcgtttgagttggattatttgtgaatgctagcttattttaacttatttgtgattttaaagtg

SEQ ID NO: 403 - DNA, 3337 bp, Zea mays
atggctgcactgcaaccctcattttcaccagcaatgactttgaagagtagctgcagcgccctgaagttcccaaaaactgcactgttatctggttttggtggcattccacgccttcaagatgcgcaagacaggaacactagcgtcgcttatttgatccccaaggctgcttcagtgactgaccatgaaatcatccacgaggaatcaggtcatgtcctcaaggttccattccggagagtccatttgactggagatcagaagcactttgatacatatgacaccagtggtcctcaaaatataagcccaaggattggactcccaaagataaggaaggaatggattgataggagggaaaagctgggtagtcctcggtacacacaaatgtattatgctaaacagggaattgtaacagaggagatgttatactgtgccagccgtgagaaccttagtcctgaatttgttcggacagaagttgcccgtggacgagccataattccttccaacaagaggcacctggaattggaacccatgattgttggaagaaacttccttgtaaaggtgaatgcaaatattgggaattcagctgttgtgagctccattgaggaggaagttcacaagctccagtgggccacgatgtggggagctgatactgtcatggacctttcaacagggcgacatatccatgagacgcgggaatggattattcgcaactctccggttcctattgggactgttcctatttaccaagcacttgagaaagtaaatggtattgctgaaaatctgagctgggaaatttttagggataccttgattgaacaagctgagcagggcgttgattacttcacaatccatgctggtgtcctgcttcgttacattcctcttacagcaaagagaatgacgggcatagtttcacgtggtggctcaatccatgcaaaatggtgcttaacttatcacaaggagaactttgcatatgaacattgggatgacattcttgacatatgcaatcagtatgatgtggcattatcaattggtgatggtttgaggcctggttccatttatgatgcaaatgatagtgcacagtttgcagaactgctgactcaaggtgaactaacacgtcgagcatgggcgaaagatgtgcaggtgatgaatgaaggcccgggtcacatcccaatgcataaaattcctgaaaacatggagaaacagttggagtggtgtaatgaagcgcctttctatacattgggtcctttgacaactgatattgcacctggttatgatcacatcacttcagccattggtgctgccaacattggagctcttggcactgcacttctttgctatgtaacaccaaaggagcaccttgggttgcccaatcgtgatgatgtcaagactggtgtaatatcctacaaaatttctgctcatgctgctgatttggcgaagggtcatccctatgcacaagcttgggatgatgcacttagcaaggcaaggtttgagtttagatggcttgaccaatttgctttatctctggatccagtaactgctatggctttccatgatgaaacattgccctctgagggtgccaaagtggcacatttctgctcaatgtgtgggcccaagttttgttcaatgaaaatcacggaggatatcaggaagtatgctgatgaaaatggttatggaacagtagaggaagctgtgatacaaggaatgaatgctatgagtgctgaatttttggctgcaaggaaaacaattagtggggaacaacatggtgaagcaggaggggagatctatgtaccagaaagctatgcagctcagaaataaggtttcctcggagacatccattccaaatgaggctaaggcatcagcagctgttctggctagtggctaaggcatcagcagctgttctaccatcttatctaatgagatggtaagcagtatgtgaataaagctggtgttgcttaccttcagtttgtgaatgccattatgtactgtaataaaaaactctgtattgtactccctagcattatcattatgcttttgtcttctttgtatcacaatgggattgttagtgatgaaaattgcaccaggggtgcctgtgttctcaacagtctgagagcctcttagcctggactgttgtgagatgggctgagaaagtccctttgaacctgaacaggataatgcctgcgaagggagtgtgcaattctattttcctgttttccaggaacctatcaaccttttggtggaaattgaggtattgtccatgattgcatggagctcagcaacaaggtacctgttctctacttgtttgcatttctcaaggggaagattcttaacaggtatcagcttcgtcatgacatctaacaattttatttataatgttcaagttatttagttaaatctacacgaccatgaaatttgtcaaagcatttcctagtcctatattatctagttttacttctacgtctatctgttctttgattgtgcgctccatctattctttgatgaagcttgcgagttctactttctagacctattgagataggaccttttggcacggtacaatatcaatactgttttggtgaagggagtatatttacagtagtacaaaaggagatggctaaacctgctacaattttttttagatggacgatgtttgtcaattgagggtgggaagtaccgaccagattgcatttgacttcatccggccatccggtctattaataaataaccaaggaagtggttcttggcaactaccttttcccgttcttgtggtttttttttcaaataggcgtgcttaaatatttcggtcttttaaattaatattataaaattctcgtctgaatatttttcaagtctagtattatgcatgataatttacatatgcatgttgtctgaaagcagaagcagattctcaaggcacctgctaattcaaaaccaaaaataggttgtaacttcgaagttgctgcattggtgaagaataatatattttagttttactctcagctgattgcttgtttgtcatgtttcactccatgcttcactctcggctgtattctgcattataccttgtttatatccaactgccatggccgatgtgagatgttaaatgtgtcggtgaagtaaataattctgctgtggcttttccgctttctgtggttccaatgggctattcccatttgcaaatattgtgtccataaggcggatttccaaatcctgcggagttgaggtgggcacctaatttcttgacgtttctgatcaatttctcatgttatcacaatgtcccttataagtgcttcccgagcagaattgagatgttaattattataaacttccattttggtttatc

SEQ ID NO: 404 - DNA, 4065 bp, Zea mays
gcagctgccgagaagacacgcaaaacaaaaccccaagaccacaaggaaacacgagcgctagtggcaggtggcagcgagtgagaaggtgagctcgcctccctcgcgcctcccattcccccctcgcgcagtcctatcgtaggaatgggatgaggccggggcccctccctccttcctcctcggcgcttctcccgtgacaagcctccattctccagtccgtgagcactccactccctgtctccgcttttgtttctctcgtcccaacctccccttttctgcgggtttgatccgcacggtacaggataggggaggatggatttgtccaggttcgcctccggcgtcgggcccagccgcgtggccccgcgggcgggcctgcagatcggcgccgccgagaatggcttccgggcctgctccctgcggcgagcacggcaccgcggcggcgggaacgggaacctcacggccgccgcgtccaccctccgcggccgcggcgggctcttctacctggctcccacgcgccggagtcatcccagtctccggctcttctacctgcttcccacgcgcgggagtcatctcagtctccgcgccagatggcggccgcgctgccagggcaacgactcattggcctacgtcgacggccccttggagaccgctaagggctccggcgaggtcgacgacaacgtgcccaccagctcggggtccgacgacgacaggggcctcgccgacgtcgacggcctcagggagatgctgcagaggtccaggaacgagctggaggtggccagggtcaacagcaccatgttcgaggagaaggcgcagcggatatccgagtcggccatcgcgttcaaggaccgcgccgacggcgcccagagggatgtgtgcgcggccgtagccaccgtgcaggagatcatcagcaaggaggcggacgccaaggaggccgtccagaaggctaccatggcgctgtccatggccgaggcgaggctgcagctggccgcggaggcgctggaggccaaccggggctcggtaggcccgacggaggttagcatcgaaggcatggagcaggaggccctcctgtctgcacaggaagagattaaggattgtcgggcagccctgtcgcggtgcgcggaggagctgagtcgtgtccaggacaagaaaatggagctgcagaaggaggttgataggctgacggatctcgctgggaaggcccagatggatgcgtccaacgccgaagaagatgttgccaatataatggtgctggctgagcaggcggtggctcttgagatggaagcctcacagcgtgtcaacgatgcggaaatggtgctgctgaaagcggagaaggccatagcctcgattgataccgtggtggagctaccgtcacctgctgaagagcagagaagcactgaagaagacagcgtttctgaagggtacgagtatagcagcgatgtcactgatgatgtttatgtaagggatgaggtgtcaagtatcgagcgcctaatggtcggtgacttgactgttcagggctttgagcagcttgaaccatcccgtgaaatatatgatgaagaaagcagtaataagatgtctgttgagcctcagaaagaagctgagtctgattcagataagtcgaaacaagggaagaagcaagaaatggaacgaaaggagcacaccaaggaaccactgagtgctccaaaagcactggtgaagagatcatcccgtttcttctcggcatctttcttctcctccaaagttgatggagagtttacacctacatctgtcttccgagggttaatgaaatcagtgcaaaaacaagctccgaagcttgttgttgggatattgcttctcggtgcaggggcattcttcttaaatagggctgagaagagtcaactatttcagcagcaaggcattgccacaagtattggaaaggtaacctccacaacaaagcccatagttcttgagatacggcgaattccacagagagtaaagaagctaatagagctcttacctcatcaagaggtaaatgaggaagaagcttcacttttcgacatactatacttgcttctggccagtgttatttttgtaccattatttcagaaaatccctggaggcagtcctgttcttggatatcttgctgctggtgtcctcattggtccatatgggctgtccatcatccgtaatgtgcatgagacaaaggcaattgcggaatttggagttgtgttcttactatttaacattggacttgagctttctgtggaaagactaagctcgatgaagaagtatgtctttggcttgggatctgctcaggtgctggctactactgctgctgttggtgtgatagctcattgttttgccgcactaccaggaccagcagcaattgttgttgggagtggcttggctctgtcatccacagctgttgtcttgcaagtattgcaagagcgtggtgaaagtacgtcacgtcatggacgtgctacattttctgtgttattgttccaggatttggctgtggtggttctgttgatattaatacctctcatatcacctaattcttcaaaaggaggggttggtttccaagcaatagcagaagccatgggaatggctgcagtcaaagcagtagctgctataactgccataattgctggaggtcgtctgttgctccggcctatttacaaacaaattgctgaaaatcagaatgctgagatattttcagcaaatacactccttgttatttttggcacaagtcttcttacagcccgggctgggttatcgatggcacttggagcttttttagctggtctgttactagcagaaacagagttctcattgcaggttgagtcagatatagctccctatcgtggtcttctgttaggacttttctttatgacgggtcttctatcacctcaattaacatcgttgctatttttagtcgttggcatttcaatggctctgacaccatggttagctgctggagggcagtttctggcatcaaaatttgagcagcatgatgtgaggagtttattgcccgtggaaagtgagactgacgatttgcaagaccatatcattatattaggctttggacgtgttgggcagatcattgcacaactcctgtcagagcggttaattccttttgttgcacttgatgctggaagtgatcgggttgcagctgggcgtgcacttgatcttccagtgtattttggtgattctggaagcagagaggtactgcacaaaattggagctgaaagagcttgtgctgctgcaattactttggatactcctggtgcaaactacagagctgtctgggcgttgaacaaatatttcccaaatgtgaagacatttgttagagcacatgatgttgatcatggtgttaatttggagaaagctggtgcaacggcggttgtccctgagaccttggagccaagtcttcagctagctgctgctgtccttgcacaagcaaaactcccaatgtcagagattcaggaaaccatcaacgagttccggaatcgtcatctgtcagagcttacagagttgtgtgctacgtcaggaagttctcttggctatggattttccagagctacgtccaaatcgaagtctttcacctccgacgacgaaaaccaaacagtggatggcacactagcaatctgatgctgatgagataaaatgggatccccttgctagcgctagattggttgcattgttcagtagataatcctgtttcatgtggaaggagggtggaataattattcatataagagctgtcataaaagttggcgtccatttttgtatgttagacacttagtgcttgtttgagagtaatggaagggactgagagggccaaaatcctttaggccccgtttgtttccttttattttgaggaattggaatcttactattggaataggctatttttttaaaatgtgacattccaccactttccaaagttatcatataagcctatctcaaattattcataggatgagatatgtaatttgattctatagatttacatgctatttttccgatgtacaaattataacacactcttctacttgctttgttataacatgaatgtagtatataattatc

SEQ ID NO: 405 - DNA, 1168 bp, Zea mays
ggcggacatggtccaaagacttcgcattcaactttatttattgcatgtaactttgaaaattaaataagatgcgaaataagaaaaagggaaaagttgaaatcgtttatttccatcccctcctcccttatctcccgcgctctgctcctcccagtcccagactcccatcctcgtctccgccatggccgccgtcggcatcccctcccctccggcgccacacgtcttcgcgcccgccgcatctccttcctcctccacgtactccacactggccccccgccgtctccgcctctccacccgactcggactcgccgccgccgcggcgtcgtgccgtacgcggtgcgccgccgctgccgatggcggggccgcggcctcggagggtgcctctgcggtggcggagctggagggggaccccgacgctggcacagacgttgccggaggcgccgcgacctccacgcggccgccctactcgctcatctccgcggacaacgtgcagaaggcgatgcgcggcctcgcaattacagatgctgaccactatgggaggcttggagtcaccaggctagcttctactgatgaggtaaaagctgcgtacgagaagatgtgtgaagaactaaatagcaaagaactagaagaagaggagcttaacaaggaacatgagctcctaaaggaatcatttactatactatcaaccgaggaagaacgaagattatatgattggagcttgtcaagaagtggacagcctgagcgatatgtctggccatttgaagttgatccattggagttggcaccagatcctccaaaggaaccagaagatgagttcccaaccaagctcgttggctacttcttactggcgtggttcatactctctgttggcctctcggtggccctcaacaaatgaagattttctccccaaaagaacatgaattgtaatccaataatctctctgccatgtacatcaatgacgctgttgtgtgcacagaagcatatggatgtacatgccatgctcttggcaattagccgaaacatataacaacacgttctgcacagattgaagtcgtgaatcttgtgcctggagttttcacaatcctgaattaagtatatgcccattttcaaacaaaacacatactactggacctgcagttcttttactgatccgtaccgtatcaatgacgct

SEQ ID NO: 406 - DNA, 2846 bp, Zea mays
gttaatttagcgtgccaccacatgttctcctggagacttgacacttttttccaacatgttcacaagttctgtgtacctggagcagaagttgggaagataacgagcagcggggatgggcttgggtcggtatttgaatcaccgcccttcgaatcgctaaaacccctctacctcttcgctggggggctcctttccctcccctcgcgtggcgtctgtggcggctatcctcgcctcgtctcccctcccccctccctagggtttatcctccaccaccacctacccaccgcctctccccaccacagataagaattatcttatcgattttttacaccggccttgaatccgatccaggagcagtcgtttggtgttggtagctgcggcagacgtctgtcctagatcgaattgactcgcgagaagaagccatgtcgacagttgctcctgcccctagcgctgctgaccagaccaccaatcttctgcagaagctgtctctggagggcaaggatggctccgacactgccaagaagccttctgggatgccatatggaggatctacccacgctggagatgcacagagcgctgcttcacaggtggacaggtcgataacacctctactacaggaggccatggatcctaatttcttctaccagcccagtgcatatgcctctccagcctattacttccctagtggttatgatggctcagccaatgaatgggactcaaggtatgctggtcatgaaggaatggagatgccccctaccgtgtatggagacatgtaccttggatatggctatgctccatacggcccatatccttcgggttctccagtaccaactgttgggcatgatggccagtcatatggttctcagcaatatcaatacccgtctcaatattatcagcaaccaacaccaacaaacgcaaaacatggtctaaatggtgccagttctcaacctgaaccgccctctgttgccagtcagcaggcacgagttttggtagatgcaacaaaagcaactccaaacgtgagggctaatggtatgacaattgctcacaacagttcgctgccacgtaagcaaacccacctgaatgtatcggtagcaaacagtggtttatatggaagaggacctatgcaaggcagtggaccttctgcaagcaattatggtcacaatggtgttcgttctccagctcaatggtacgatggtccagtttactcgaatgggcatcagataccaactgctagttccacatcttaccgttccaattcgtcttctatgagaagtcagagccagcatccaacaacaaacctcatgggtatacatgcacagatgccttcgtctggaatgggtctgacctcacctagatatccttctaggatgtacccagacaacagattatatgggcagtatggtcagtatgggaacacactgaagggtggccttggttttggatcaaacatgtatagctcgagaaacaatgggaggtggggagttgtggataccaaatacaagcccagagggcgtgcaccttttggttttagtggtgagaaccaagatggctttaccgagctgaacagaggaccaaggtctggtggtttcaagcaccaaaaacaattcggtcctactgtaactattgctgtgaagggccaagccctcccttcagtggggaaacagaacagtactcttccagacaaaggccaatttaaccaggaagggtttcctttaacctacaaggatgcaaagttctttgttatcaaatcatatagtgaggatgatgtgcacaagagtataaaatacaatgtgtgggctagcactcctaatggaaataagaagctggatgctgggtaccgagaggctcaggagaaatccagtgactgcccggtgttcttgtttttctctgtgaacacaagtggtcagtttgttggtgttgctgaaatggttggtcctgtcgactttgataagactgtggagtattggcaacaagacaagtggaatggttgttttccactcaagtggcacatagtcaaggatgtgcccaacaacactttgaagcatattacactggataacaatgataataagcctgtgacaaacagccgtgacacacaagaggttaagctggaacaaggtcttgaaatgttgaagattttcaaagaacatgttactaaaacgtcaattttggatgattttggtttttacgagaatcgccaaaagttgatgcaggaaaagagggcgaatcagcaactgcttcaaggccagggggccgatgtttctcaagagaaagacaaggatgcgactaatggcaaaccagggtcacagaaacaggcaacgagcaaggaaggcactcctgctgaggtggcggcggatgcctccaaaccagtagctgaaagtggaatatcaaatgacaactaagcatcatgcatactggtcggcaccataccggtgcaaatgctgcaggttttgcggtatctgcaaatcaaaacctattgattctgcctgaattctggacttctttcggtactggagttcgtgagatggggctcatcatgggagtgaatcagattttacttattgtcgctttgctagttgtgtgactggtttttggtgtcttggaacccgtgttaggcttcttacatacccctgtgacgacaccgagtttgttgtaacccttgtttttttttgcctttttgttttagttctatcattgttaacgaagcagcctatttcctatactttgaacaacattaaggtagttttttttgcatgttgcggtactgtggagagtaataagacaaaaagactctaggtttaaaccattttatccccgtattctgtattgattatatcttgttttttatc

SEQ ID NO: 407 - DNA, 3246 bp, Zea mays
atccatttccatccgactatccgaggaggatcggtgacggtgggcggcgcgtcagcttcccccgacgcgtgcgtgcgtgcggccgtgcgcccgcgcgttcgccgtctgcccgtctccggccgtcgtcgtccggcggaagattcgcacgcacgccatgccgttcggttgaatttctcgggaaggagaagctgcccgttcgatgtcgacgtcggcgtcgacgccggggagagggcatcggatatggattcgggcgcacgcgcatcccgacgtgtggtggcttcgttcgtctccaagcccgagtcagcgggagattccatcttcaaacattgcattgcacagcgcgcactacgctaggaaccttcaaaagtgcgaacattgcggaaatatagttccgaggaagcttgtggatcaacactacgatgaaaaccatgctccggcatctttgtttccaaactccaagcttctcttagatgctgtcaattcataattgtagtattgttcaagtcaagcgttacattgagatgttgtttgatttacatattttgtaatgtgatgggtaattgataacatgtcaaattgtaattgtataccatactaggaattgatactagcatattcaaacttgttaccactaattctcgagtgcaaattattattgttgccatttatattacattttgtgaaccaagcagcatctaagaagcacagaagcctgcactattgtttttttcctaagttcttatcttactctgaagaagctgcaacattacatgaatgcatgtttacaatcattatgcctgcaaaatgtacagttgctttaaacagttatgaaagttttttttttatgtttgtggcaggcaacataatttattgtaaccactaagggtgtgtttgtttacctcttagattatataagttaaattatgatgaaagggtaaaagtgtaaaatattactttggggtcacaaataaaccgaaataagctattattctgtagcttatgttagcttatttatgattataaaatgatattttaccaccctatcctttcacagtaatttagcttatataatgtaggaaacaaacatggcctaagtaaacaaatgaaagtgtctttgtcagccactaagttaatgtagactgtagaaaaattaaagagatgacaatagatgtatactttactttttatttattattaccacctcttaatttattagttcatctgcatcactaatcttattgcgtatacagatgatttgctcactctgcaaacacacagtagaatgtgggtttgggatcttcatacaggcgtacaatgcccccaaaggatgctcgagtgccaatactgtcagtttgaactgcctgaagtcgatctttttgaacatcaggatgtgtggaaatcgaacagaatattgtcaaagttgcaggaagtatatcagacttcgtgaatggattggacatgaactccagttccatacgattttaaatgctgcatcacaactaagatgctagcaagggggtggagaacctggtgatcatcggctctggaccagccggttacaccgctgccatctacgccgcccgggcgaacctgaagcctgtcgtgtttgaagggtgccagatggggggtgtccccggcgggcagctgatgaccaccaccgaggtggagaatttccctggcttcccggacggtataaccgggcctgatctcatggacagaatgcgcaagcaagcggaacgctggggcgcagagctttaccaagaggatgttgagtttgtgaatgtaaagagcagcccgtttgttattcgtagcagcgaccgtgagggcatatgtaggtgaaatgtcatagtctaattattgcaactggagctacggctaagcgcctccgtctgcctcgtgaagatgaattttggagtagaggcatcagcgcatgtgcaatatgtgatggagcttcaccacttttcaagggccaggttcttgcagttgttgggggtggtgatgtagctacagaggaagcagtatatttgacaaaatatgctcgacatgttcatttactagttagaaaggatcagctacgggcttccaaagctatgcaggacaggttgattatggcgaatgtttcagagtactcaacaaccccaacataacagtacatttcaatacagaagccatggatgttgttagcaatgacaaagggcagatgtctggcgttcatctgaagagaagagatacaggagaagaatcagttcttactgtgaaaggtttattttatggcataggacatactccaaacagtcagctgttgcagggccaaatcgaacttgatagtgctggctatattttagttaaagagggctcagccaaaacttcagttgatggtgtattcgctgctggtgatgttcaggatcatgaatggagacaagctattactgcagctggatctggatgcatagctgctttgtcagttgaaagatacttagttgccaatgatcttcttgtcgaatttcaccagcctgttcaagaagaaacaaagaaggatattacagataaagatgttcaaatgggctttgacatttctcacagaaaacacaagggacagtatgcactccgcaaactgtaccatgagagtccacgactcatttgtgttctatacacttctcccacatgtggtccttgcagaaccttaaaaccaattttgagcaaggtcatagacgagtacggcgagtttgttcatcttgttgaaattgacatcgaggaggatcctgaaatagcagaagctgcaggcatcatgggaacaccttgtgttcaattttttaagaacaaagaaatgctcaggactgtatcgggtgtgaaaaggaagaaggaatatcgggagtttatcgaggcgaacaaatgagttgagcacgcagtggaccccctcaaggttttttgaagtcagtagttcttttggcgctattttgacgccaccccgtcccccggtggccaatttttcatcagattttaagacgagcctggtctagtgccatgccaaaggaaactagccgatccctcatattggattatacagctcaaaatatattctttgctgtgtgtgtacaacatacatggagttgaccccccaccccctgctgatcaatcatcattgcggcattgccttgacactgccaatgtgcaaactatttccacggattagcatacattaatctgaagtatatatatactcggcaatgctgaatccattttgat

SEQ ID NO: 408 - DNA, 951 bp, Zea mays
atgagggagctgtcctgcttcggcgacggctccgtcagcgtggccacggccgacgccgccgtctccggccgcggcgcgctcgaccgggcgctgcaggcggccaccaccagcgtgtacagggccgcgctgtcctcgggcaaggaggtgctcgtccgggtgacgtggacccggagcgcggccggagaggccggcgtcgcggtcgccttcgacttcgatgacgacggcggcggcggcacctccgacgcgccgaagccgtcgccggcccggacgaggcctcctgtcctcctgctgcacaagagaagagggagccggtcgctggtcaccggcgccggcacggccgtcggcgtgcactgggacaccgcggaggccaagtacccgtcgccttcgtccccggagcccgaacgcgactactgcctcgccgtcgtggccgacgccgagctcgcgctcctcctcggcgcgggcggcgcggcgcgcgagctctcccgccgcctcggcctcgcaccgagcgctcgcgccgcgcccgcgctcctcgtcagccggcgggagcagctgcgctgcgcggcagcggcggcggcggcgcacgtcacgcgctgcaggttccgcgagggcggggacgagcacgaggtggccgtgcacgcgtgcaggggcggggagggggagctgcgggtcaccatcgacggcgagaaggtgacggaggtgcggcgggtgggctggggcttccggggcaaccgcgccgccgtgctgcccgacggagaggtggtcgacgtcatgtgggacgtgcacgactggtggttcggtgggcggggtggcggcagcgcgggctcgggggcgcagttcatggtgaaggctagggcggagaaggagggcaggctgtggatggccgacgacacagctgccacagagcagtcgcccggcggcttcttcttgcatgtgcagtgctaccgccggtga

SEQ ID NO: 409 - DNA, 780 bp, Zea mays
attgcacccttggctcctactcactctctctccccatccgcgccagtccaaccaagtcagcacccgcgcgcggcaaggagttcacgcccatggcgagcaccaacatggcgtcggccacctcgcggttcatgctggccgcgggcgtgcccaccgccagtagcggcagcggccgcgtcagcttcgcctcggcgcccaaccggcttggcaggaggcttgtggtccgggccgatgaggagtccccggcagagccggcgccgacggcggaaggggagggcgccgtggccaccaagcccaaggccgagaagccgccgccgatcgggcccaagagaggcgccaaggtgaagatcctgaggcgggagtcctactggtacaacgggatcggcaacgtcgtcaccgtcgatcaggatcctaacacccgttacccggtggtggtgcggttcaacaaggtgaactacgccggcgtgtctaccaacaactacgccttggacgagatcctcgaggtgaaatgagtgaggccagtctgctcaaggaccccatgctcctgtgtgatttgtagttgtgaagtgaggctgctgcctagctgctacgttagctgctagcgtcacaacatcaatcttgtaatagcttaatctccacaatcatcatgtaatttattgcatgcttcattcaccgtggactcaataatctctcttgctctaaaatcgatgtattcgtttttcttgtgattttgtacatgcacataaatttctctctggaaacattgtttgtgctaacaacaca

SEQ ID NO: 410 - DNA, 1887 bp, Zea mays
gcaggccgaccttgcgtacgtacgtcgtagcggccatggacccgtacaagcaccgcccgtcgagcgccttcaacgccccgtactggaccaccaactccggcgcccccgtgtggaacaacgacagctccctcaccgtcggcgcacgaggtcccatcctgctggaggactaccacctggtggagaagctagccaacttcgaccgcgagcgcatcccggagcgcgtggtgcacgcgcgtggcgccagcgccaagggcttcttcgaggtgacccacgacatcacccacctgacgtgcgccgacttcctgcgcgcgcccggggtgcagacgcccgtcatcgtccgcttctccacggtgatccacgagcgcgggagccccgagacgctgcgcgacccgcgcgggttcgccgtcaagttctacacccgggagggcaactgggacctggtgggcaacaacttccccgtcttcttcatccgcgacggcatcaagttcccggacatggtgcacgcgctcaagcccaacccgcggacgcacatccaggacaactggcgcatcctcgacttcttctcgcaccacccggagagcctgcacatgttctccttcctcttcgacgacgtcggcatccccgccgactaccgccacatggacggatccggggtgcacacgtacacgctcgtcagccgcgccggcaccgtcacctacgtcaagttccactggcgccccacctgcggcgtgcgctcgctgatggacgacgaggccgtcgccgttggcggcgccaaccacagccacgccaccaaggacctcacggacgccatcgcggcggggaacttccccgagtggacgctctacatccagaccatggaccccgagatggaagaccgcctcgacgacctggacccgctggacgtgaccaagacgtggcccgaggacgcgttcccgctgcagcccgtgggccgcctggtgctcaaccgcaacatcgacaacttcttcgcggagaacgagcagctggccttctgcccgggcctcatcgtccctggtatctactactccgacgacaagctgctgcagaccaggatcttctcctactccgacacgcagcgccaccgcctcggccccaactacctgctgctaccggccaacgcgcccaagtgcgcacaccacaacaaccactacgacggatccatgaacttcatgcaccgccacgaggaggtcgactacttcccctccaggtacgacgccgtcaggaacgcgccgaggtacccgatcccgaccgcccacatcgccggccgccgagagaagactgtgattagcaaggagaacaacttcaagcagcccggggagaggtaccgcgcgatggacccagcaaggcaagagcggttcataaccagatgggtcgacgcgctctccgacccccgcctcacccacgagatcaggaccatctggctctccaactggtctcaggccgacaggtctctgggccagaagctcgcgagccgcctcagcgccaagccgagcatgtaagatctaccagacaagggcgccgcgcgggggaggacggagctctctgtctgctttcgctcatgcatcatatgcatggaaccaagacaaattactctagcagactagcacgcaaactgaatcgcgtttagtttagtttttttggccccggataaaggctgctagcttggttgtaataatggctggctgtgtccagaactcttgtagaagacagaactcgtccaaaacaacatcgacactgcattcatggttattgtgcagaagcagaactcttggtttcagttgaatgtttggctgggtttccatccgaataagggctttgtttaatctcgatccatacgaattaaacgagattgagtgggtttaaatctct

SEQ ID NO: 411 - DNA, 659 bp, Zea mays
aaaaacgaaaaacgaaaaactagagggtggaggacaacggtgtccagcaaaagagagagaagaggaggggaggaggtggaagtagcaagaatggcgtgctccaccaatctctgcttctcggcgtcgattcctcctcttccagcctcttcttcttcttctgtctcctcccccttcctcacggtggagcgtgtgtcctatgttccgtccttgtccaggtggacaatccgatacaagcaattggggcatgcatatcagagaagccacgttctggcctttgctagtgcagatgcatcacagggtaaaagaagctcaggtgagaatgttgtgatggttgatccactggaagctaagcgtctagctgctaaacaaatgcaagaaattagggccaaagaaaagctgaaggagctgatgacacctgcaatggaatgatgagtctattgcttcgatttaacgtgtgattacatatatcttgaacttattataagccagtatgtcgcctgtagagtgtagacaggtacttttataatatataatcacaacttccatatgtactgatacattttatctttgttctgcttgctactgttttaattgaatacaagacatactatggaatatttaaatttgtcatttgtagtagttgtgtttgtaactgcaag

SEQ ID NO: 412 - DNA, 338 bp, Zea mays
tgggaaggcatattttcccccacatgacagtatctatacgtattgcagttgaaatggaaataattgaaatacaagatcatccatttactcaacaacagcttccagcttgcaagactatacttgcgactcagacacacgacctgggcggcgacaacgtgtttggtagctgccgtcctctccataacgggctcgtcagcctcatgcactggtctgggaagggcaagccatgggaccgtctcgacgccggcaagccttgcgcactggaccacacctggaaggcgtacgacctctacattggcgagaatgattcatcatcagcatcagcttcatcggggtaa

SEQ ID NO: 413 - DNA, 1366 bp, Zea mays
attttcttaaaaaaaatctcaatcgcaacaacacaaaaaagacccgcaatatcgattagcgagagtcgttcctccaccaaaccaaccaattcgcttctccgtcaacttcacttcctcgtcgacgcctccgtcccaccaaccatgccggcggccatggcggctgcggcggcgcagaggctcctcgcggcgagcacgaaaatcatcggcgttgggcgcaactacatagcccacgccaaggagctcggcaatccggtccccaaggagcccgtcctgttcctgaagccgacctcgtcgtttctccacgctggtgtggccaccgccgccgtcgagatcccggagccgctcgagtcgctacaccacgaggtcgagctcgccgtcgtcatctcccggcgtgggcgcgacgttcccgaggcgtccgccatggactttgttggaggttatgcacttgctttggacatgacagcaagggaccttcagtctgttgctaagtctgcaggccttccatggactttggctaaaggacaagacaccttcaccccaattagtgcagtagttccaaaatcagctgtcactaatcccgatgatctcgagctctggctgaaggtagatgatgaactaaggcagaaaggaccgacaagcgacatgctattcaagattccttttctgataagctatatcagttccatcatgacattaatggagggtgatgtgatactaacaggtactcctgagggtgtgggtcctgtccgagtaggtcagaagattacagctggtataactgacctaattgatgttgagttcgatgttcagaggcgcaatcggtcattttccacatgatgcaataagcaagaaagtaatggtgaatacaaagtgcagtactcgtcctcgaccttgaatcgcattactggacctggagccattgcagatagctcttgagccttaccttgatttaatttacctgggttttgagagactatctatgaatatgctaactcgttcgtaaagtatctttttgtcccaattttgattgatggagctttaagcttgcttttctgtatgcaataaaaaaacttatcacatttttctttctttctttctttccagcagcgacttgaaacagcttccgagtggggtgcacggccgatctatgtaacgtacgcgcataagaaatggtgtcctacaaaatgccttccacttgcttgaaacgatatgtagatggacagcgacgacgaacaccttaactccctctcgctagatatcgagccagcttagttcggttcgactgagcttgagctgactcgttaaggtaaagagatgacttggttcgttaaacaattgagtcagagaattagcttggctcgtttgc

SEQ ID NO: 414 - DNA, 4547 bp, Zea mays
acaaacagcaagggcgctgcgcgctagcagaggcgctgagctgagctctcagccatggaagtggtcgatctctcccccacgtcccgccccctctcaccgctcctctccaccgcacccgcccgccgcctccgcctcctccctccccgctgcgtcgtcggcctgcgcgcctctccccggacccgaggactcggctgcgttggaggtagtctcagcagaaggcattctttttgtaagaacggattcttcgcaacaagcagttcgtcagcctcagtagaacccgctacccaggaattgggaacagcggatgcagtggagtggagtggggatgccatacgtcggcgtttccttgaattttatgcagcccgtggccacaagatccttccgagctcgtcgcttgtgcctggcgacccaactgtgttccttaccatagcgggaatgcttcagttcaagcctatattcctcggcaaggtgcgacatgcattgtgttagtgaaggcttgtgtgcttgtgaaatgcggcaccacatgagacctaagggcatgtacaacctgagacttggttcggtttttaaaatacaagagacaactaagagactgcataatacaactgagactctgggatactaaatgtagctaagagacaacatgtacaaagagtcatgaagagccgttctcttgtatttttttcacttagccacttagaaacctcttaagagaccccatatttttttcacttatgatttatgaactccgctttgcatgtggtcaataaaattggaaatgttgcacaaaatggctaagtatcaatgcgatcgcctacagggacatctgatttttggggttgggtacacgaggacgagggcttgtttgggaattttctggaatatgaactaataatccttagacatcaaaatatgtcactgacccatctactcctggttcaaagttgccccacttatttttttctaggaaatggttaattgataactatctattcttgcctttcttttatgacacgtacaagttatttgcaaaaatttaaaagttgaaacttcacggttgcaagtgcatttctaattatttatacacaatcagttactagaatcagtagaataagccattgagcatgatcctatattttcttttgtacatctgtaacgataataatataccacctatgatcaatttcaatgcagtcgtgacattcagactcgaactaagattctgacctcgactggaacaggcactgtttcctgtttcattttacttcattccaggtcttttgtgttgctacttacaggaacctaggcgtgtgccacgcgccactacctctcagaagtgcatacggacaaacgacattgaaaacgtgggtcgcactgctcgacatcagaccttctttgaaatgcttgggaatttcagttttggtgattacttcaagaaggaagcaaccacatgggcatgggagctggcaaccaaggagtatggaaatttcctttattctccatggagcatgacctccatattggtgaattataaactgtccatctgaaaactttaccatgttctgcgcactgtcatagggatgtcattcaaatttgtatgcctctacaatctcagactctcagtgttgtcctatcgcattgtcatgtcaggtttagttatcttacgttgctcttcttttacctggaaagataaaactaacattttagccatgaatgtgtgatttatttagaacatggccagatgattactaatgttgtagttctgtttgatttgtatcagtgctaataaattacctgtcgggcttatgtttccagccattcagaaaacttttgtacccatcggtatttagttctttcattttacaaggtttgatatatatttttcattctctttctttaggtatggattgcctgcagaaaggttgtggattagtgtttttgaagatgacaatgaagcattcaacatctggcacaatgaggttggtgtgccaaaggagcggatacagaggatgggtgcagaagataacttttggactagtggcgcaactggaccttgtggaccttgctctgaaatttattatgatttctatcctgagagaggatcatcagatgtgttgtttgcaggatttgggcgatgatagccgattcattgaattctataatcttgtctttatgcaatataacaaaaaagacgatggatctctagaaccgttgaaacaaatgaacattgatacaggaatgggccttgagcgtatggcacgcattcttcaaaaggttccaaacaactatgagacagacttgattttcccaattatagaaaaggcagctagcatggcgatggtgtcctatgcaaaagctgatgatgccacaaagacaaatctcaagataattggagatcacatgagagcagttgtttatctcatatcagatggggtaattccctcaaatatcgggagaggatatgttgttcgaaggctaataagaagagtagttcggatgggtagattgataggaataagaggtgacgggcatggaaactctgaaggtgcatttttaccttcactagctgaggtagtgatcagccttagcactgagatagattcagatgttgaatcacgacggagatcgatccttggagaacttcaaagggaagagatgcgatttgttcagactttggaaagaggagaaaagttattagctgaacttctggatgaagctttattaaatgctggtaataatggaaacaagccttccttatctggaaaaaatgttttccttttgtacgatacatatggtttcccagtagagattacagctgaaatagccagtgaacaaggcgttactgttgatattgagggatttgatattgaaatggaaaaccagaggaaacaatctcaagctgctcataatgtagtcagactttctgtaggaaatgagaccgagatagtaaagaacatcccggatactgaatttttgggatatgattctctctctgcttctgctgtcattaaaggtctcctagttaatggaaacccagttaatgaagtttctcaaggttctgaagtagaaatattattagaccggacaccgttctatgctgaatcgggtggtcaagttggagataatggtttcttatatgtgaatggaggggaagatagaagacaaacaacagttatagaaatcaatgacgtccaaaagtctctgggaaatatatttgtgcacaaaggcatgattaagcaggggtctgtagaggttggcaaggaagtagatgcttctgttgatgcaaaattgaggcagggggctaaggctcatcacactgcaacacatctactacaatctgctcttaaaagcgtagttggttcagaaacttcacaggctggttcccttgtggcgtttgaccatctccgatttgacttcaatttccatcgcccactttctgaagaggaattaacaacaattgaagcacttataaaccaatggattggcaatgcagcacatgttgagacaaaagtcatggctttgcaagatgcaaaaaatgctggtgcgattgcaatgtttggagaaaaatacggtgaacaggtcagagtcgtagaggttcccgggatctcattggaactctgtggtgggactcacgtcagtaatactgctgagattcgtggtttcaagataatttcagaacaaggaatagcttctgggatcagaaggatagaagcagttgcaggtgacgcttttgttgactatgtgtgtgctcgggacaattacatgcggcgcttatgcttatcccttaaggttaaggctgaagatgtgaacagtagagtagaaacaattcttgaagagctaagagcaaccagaaacgtagcatcatctctacgcagcaaaattgcagtgctaaaagcagcttctcttgcaagtagagctacaactgtggagccccagaatgtcaggattgtggtcgagaacatgggtgatgtcgacgcagatgggctgaaaagcgccgcggagtatctcatagataccctcaaagaccctgctgcggtgattttaggatcaagcccaggggatggtaaagtcagcctggttgctgccttcagccctgcaatcgtcgaaatggggctgcaggccgggaagttcgtgagtggcatagccaaactctgcggcggaggcggtggaggcaagcccaatttcgcccaagctggggggcggaagccggagaacttgcccgacgcccttgagaaagcccgagctgaaattgtggcacgggtatcaggttcgagctgattctccgctgcctcacacctgatactggaagtatagggataggattcatatgaaatgtatatgtaattgtcattggcattctaagcgaaaacacttgtatttctccctaccttgccgtgtacgctttctgcagatgacggagcaaattttgtagcttgtaattgtaactagtggccgaacagaacggggaaaagatcaaatcttcacacagcaaaactactgctcatgtttaatctaatcttaaaaacataagaaattatttgtcacat

SEQ ID NO: 415 - DNA, 1277 bp, Zea mays
gcagaccttatccaccaacctccggtccacggtgactggccgcaagctcctcctctcccgcaaacacccacgcccactccattgctcctctcctccaacatcgctcacgcggtctcctctccccgctcagctccgctccgctcccggagacacgcaagcttcccgttcccgggaacgcgcactaaagatgcctccagccttcgccgccgcaccttcctcctcgatatgtggcgttcgcatcccaactgtgcgccgtttcgaagcgcaaagcacggtttccacgcccagatttatgcgtaatcgggtggcagcaaaaacacggtctacatcagcttggtccttgaaggctggcttgtgggattctctcagatctggccttttgaagaataatagcagtacagagacagtagagccaccaccagcaccacttgaagtggaagagcctttgcctgtggaaatagtactcctagaaagaacactacctgatggaagcacagaacaaattttattttcttcagccggagatgttgatgtatatgatctccaagccttatgcaataaggtaggatggccacgcaggcctctttcaaagatagcagcctcattaagaaatagctacttggttgctacactatattcaataattagatcttcagaaacagagggagaagagaagaaacagctcattgggatggcacgagcaacctcagaccatgccttcaatgcaacgatttgggatgtccttgttgatccttcataccagggtcagggtcttggtaaagcactcatggagaaagtaattcgtactttgctccagcgagacatcaacaacattacactgtttgcggataacaaagttatagatttctacaagaacctggggttcgaagttgatcctcaaggcatcaagggcatgttctggtaccccagattttagcaccagcagccagatatatcgttcgaggggttgttgtacttgaagcatctccccgttctgaaagggtaattgacaggtcagggctccacgccctgatggatctcgcacttaatatttcatccttggtgagaagctgtaattttcttcaatgctaaaacgaccatgtgatcggctcaactctccgcacccctgttgtaaccataaccccaacaaaacacgctatttgtaatacccgtgtttcatacatgcgctctagactcttgccatctgtatgtaacgtacgctttcaaatttctacattcgaaatggaaaaaaaaactgtatccatcagttatccata

SEQ ID NO: 416 - DNA, 1127 bp, Zea mays
gcaaaggtgtgatcttgatcttggggggtactactcagaccacctaaccaactcagctagaggctctctcacactttgaacttagcattttaccttggatgttgttcttgaaattaagatgttgaacctccacgcaatgcatctcctattttcatgagctttttcttgcaggttatgaaagctctaattgatatggaagctctccagccaacaggagatctctcaccggttaggaggtccatacaatttttcttggataatctgttgagccagacaccggatcagcaacagactctggctgcaattggagaggacttatttgctatagcacaagatcaaccttttcggtttccatccacatttacatttgttataagggcattctctactcttgaaggaattggatacatattagatccagaattttcgtttgtcaaagttgcagcaccatatgctcaagaactgttagacttgaaacagagacgacaaactggacctcaattggtccaggaaataaggaagcaagcaaatgatgctcgtgattctacaatatcaatgccgtacagaatacagagaattgaagattttgtaggacaacttgagacaggagatctgaaacttagggtcagagtactggagtcagaacgtgctgcacgtaaagctactgttcttcagatggccaccatgtatacagccttgggtggtactctcttgaatgttggggtcacactgaatagtcaagggaaccagataattgcaaacggctctttcattggtgcaggaatatttttggcattgctggtcagatctatgcaaagagtgaagaagctcgacaaatttgagaccatgatataattatcttattttgtaaagacgtgcaatcgccggaattacatgcgagctgcgcgtcccttcgaggttgatagcctatgcatagtgtatatagtaaatgatattctttctggaaacaacctaacgtgttgctcttgtaaatctttacaaactatatcattctttagccagttaggcacatcgatcaccaaggagtcgacaaaacaaggaaatcaagataattgtaacatacactacacaaaacatttatgttagggtggcggtggaaagatcaa

SEQ ID NO: 417 - DNA, 1140 bp, Zea mays
gtggcatgtctgcctccacccctccgccaccaccacagccgttgcctttgccgcgagcgaccgtagcgaggtgattgcaatggtggcctccactgcttcccgcctctcgcccccgcgcttcagcaccccttccccgtctcttcatcctccaaaccgccgctcgcgcttctcccctgttcgcgcagccaagttggaagctgtgctgtctattggtgctcatctaatcccacacccaagaaaggctgcaagtggcggagaagatgctttctttgccaatagcgatgctggcggagtatttgccattgcagatggtgtctcgggatgggcagaaaagaatgtcaatccagctctattctctcgagagctcatgagaaacagctctaatttcctcaatgatgaggcggtcagtcatgatcctcagattcttctcatgaaagctcatgctgcaacttcttctattggatctgcaacagtaatcatcgccatgcttgagaagaccgggactctaaaaattgcaagtgtgggagattgtgggttgaaagttattcgtaaagggcaagtaatgttctctatatcccctcaagaacattattttgactgcccataccagataagctcagaggcagagggtcaaacatataaggatgcattggtttgcagtgtaaatcttatggagggtgatataattgtgagtggttcagatggactttttgacaatatctttgaccaagagattgtttccataatttctgagtcgccaagtgtagatgaagctgcaaaagcattggcggagcttgcaagaaaacactcggtggatgtcagattcgattcaccctactcaatggaggcccggagtagggggttcgatgtcccctggtggaagaagctacttggaggcaaactaataggcatgcataagctctatacaaaaggccatgttcagggtggcgacacagaagaacaaaaggggaatgagcagggcgctgcagctgtggttgcatacaaaatgaatgatgaagaagtagcttgagttctgggaccatcctcattttcattctcttcattttacttttctgtgatgactgtattatactgcacataaaggaattgaagcaaaataaatttgtgtgattgtgtcta

SEQ ID NO: 418 - DNA, 3678 bp, Zea mays
atgattattgacgccatcgactggctggtgctatccacgacggaaaaggtgcggaacatatatgatgacctcttcgaggtgccgtcgaaggtgatgcagacggcgatcacgccgcgtgacgctaccagcagcatcaacttctattggaactccaagggctcgtcgcttgggtacataccggtcttccacttctccgaggtgctgcaggcgggcgccggcgttgttcgccagttcaacatcaacatcaacggcaagcggttcacctcccatgattattacacaccacggcacctcgaaagtggctacgtatacggtaccagaccttacaccaaccagatccggtataacgtctccatcgttaagacagacacgtcaacgctcccgcctatcatcaacgccgacgagattttcatcgtcatctctacgaccaacgttggcacggactcggaggacggtacgtgggatggactgacgtgcagctatgccatttctgatcctccaaaaattactgccctaaacatgtccttcagtggtctgaccggtgacatatcatctgctttcgcaaatctcaaggctgtccaatccttctatgccgataatccagacctttgcaccaacgccggggattcatgtcagacggcgccgcaaggaaagagcaagctagtcatctactacgtcgctgttcctatggctctgatcgtggtggcgttggcagtactgctgtgttgtcttctgcggcggcgaaagacgcgagggctagcggacgtctctgtgaagccccgggacaagactccgacgagccttgcttcaatggcggccgacgaacacagacttagctcgctgcggcttgagaaccgccggttcacatacgaggacctagagatgatcaccgacagcttcaagcgtgtcattggccggggcggctttggatacgtctacgagggcttcttggaggatggcactcaggtggcggtgaagatgaggtctcagtcgtccaatcagggtgccaaggagttcctcacggaggcacagatcttgacacggatccatcacaagaaccttgtctccatggtcggctactgcaaagatggggtgtacatggcgcttgtctacgagtacatgtcagaaggatccctgcaggagcacattgcaggaaaacgcttgacttgggggcagaggcttcgaatcgcattggaatcagcgcaagggctagagtatctgcacaggggctgcaacccgcctctgattcacagggacgtgaagaccagcaacatcctactgaacgcgaaactggaggccaaggttgctgatttcggcatgtcaaaggctctagaccgcgacacctatgcgtccacgaacactcttgttggcacaccaggatacgtcgacccagagtacctggaaacaatgcagccaagcaccaagagcgacgtgtacagtttcggcgtggtgctcctggaactggtcacagggagacctcctatcctgcacagcccacagcccaccagcgtgatccagtgggcacggcagcacctggcgcgcggcgacatcgaggtcgtggtggacgcgtccatgggaggcaaccacgacgtcaacagcgtgtggaaagccgcggaggtcgcgctccagtgcaccgagcaggcgtcggcgcagcgccccaccatgggcgacgtggtggcgcagctcctggagtgcctcgacctcgagaagggccgctccgccaacgaaagtttctgcgacggagacgacagcggctccgcgaccgcgagcttgagccacagcagcgcatttgtgacggggcgtatttttgggacggtgccaatggtggagacaggccctgccacgagacgcgcgctcgtgtgtgtctcactgtctcccctgtcccctctcccgcgtgctcgtctaccttcggctcccccatgggatgagagcgccttcctcgccatggccgcctcccacctgccccccgcagccaccctcgtcaagaagtacccaactctcctccacccgttcggcgccaaaccacacgcccagaggctgatcttcaggtgccgcgcgaccagcagcgagggtgcggacgatggctgggcgtcctttgtggacgagctcaagaggtcgctgcaggtggacccgtccgacgcggtgattagcaacgccggcgcgggtctcacatcaaataacgacctcgtcaccgcgctgccactggaaccctccgctggtccggctgcgggagacgcgaccactgccgctgccggcgcggtgagcgagctcctgggcgtggacgcgtcaggcgcggtggccacccccgaccgcctcctgagctccctgctgcacctggacgcgtccaacccggtggcgagcgtggcgggcggcgcgctgtctcgcctggacgcgctcacgtcgggactgtcggacgcgcagcggtgggcgctgttcgggttcctggccgcgacgtggctgtacctgaccgcgcggcccggggtgctgagcggcgccgtggacatgtacgtgctggcgccgctgcagctggcgctggacagcgtgctgggccggcggagcctcaagatgagcgacttcgtcgtcggcgagcgcatcggggagggctccttcggggtggtgtatgccggcgccgtggtgccgaagaacggcgccgtcgtggaggagcggtccggcaaggccaagacgagcctccagaacgacgacaggtacaaggagaaggtcatactcaagaagatcaaggtcatgacggtgggggcgaaggagtgtggggactacgaggagtggttcaactaccgcgtgtcgagagcggcgccggagtcgtgcgccgacttcctcgggagcttcgtcgccgacaagaacaaggcggagttcgtcaagggcggcaagtggctcgtctggaagtttgagggcgacaggacgctggccaattacctgagcgagcgcggcttcccgtccaacctggagcgtctcatgttcgggcgcgtgctgcagggcctgggcccgctggagcgcgaggcgctggtggtgaagcaggtgatgcggcagctgatcacgtcgctgaagcgcatccacgccacgggcatcgtgcaccgcgacatcaagccgtccaacctcgtcgtgacccgccgcgggcaggtgaagctcatcgacttcggagccgccaccgacctccgcatcggcaagaactacgtgcccgaccgcgcgctgctcgacccggactactgcccgcccgagctctacgtcctccccgaggagacgcccgagcccccgccggagcccatcgccgccatcctctccccgatcctctggcagcagcagccatctttgcagctgaacagcccggacctgttcgacatgtactcggcggggatagtgctgatgcagatggccataccgacgctgcggacgcagtcggggctcaagaacttcaacgccgagctcaggtccgccggctacgacctcaacaggtggcggcagagcgcgcggcggaggcccgacctgcagatcctggacctcgactccggccgaggctgggacctcgccaccaagctcatctcggagaggggcgccaacggcggtggccgcctgtctgccgcggccgcgttgcgccacccgtattttctcctgggtggcgaccaggccgcggcggtgctgtccaagttctcgctcagtaaatag

SEQ ID NO: 419 - DNA, 808 bp, Zea mays
acgagtcacgaatgaatagtacacggcgctccctccctcctcgagagcgtgtatgcgcagctgcagctccgcaaggcagatgttgctgactcgtctgtccagcgtttcttgctcgtcaacagcgcagcagttgcatgcgggcgtcggcaagttcgccgccgccgcatgctggagctggaagaagaagcgcgaggagctcccctgcttcagggccagactggccggcaagccgccgcgcgcctcaccggcgaagggcggcattgtcccggccagcgacgatgacgacggcgttagcctcggcaccgtgaagctgccgggcaacatcgacaccgctcggttggagtccttgctcttccagtgggggaacagcctctgccaaggcgccaacctgccacttccggtgcctctcaagatttcttcacctgatgcgatcgaccaggtggacaaggttgagggcgggatcaggctagggttcgtcgcggtcgaggacggcgcgacgcggacgctggtgtacatcgattgcctggtctctccggccccggatggctctggtccggtgttccgagcgatcaggaacggtcctatgaaggacaaggagccacctggggagcccaggatcatgagaagcctccttcaggctctcgaaaagtctattcagatcgctcgtgtttgaccgtgtaaacgccacacgatcaagcgctgcatctctgtaactattaattaagagccctctaaaccctgctattctagttgtctcttgagtcttgaccattccagggaaaaaaataaaccaagaaagttacaggaa

SEQ ID NO: 420 - DNA, 1839 bp, Zea mays
cctgcctgcctgtggtcgcctgtatcacaagctcccaaaaccgccgcgcacgctgccaccaccggtacccaacgaacatggcggcggcgccgtcctccctcgcctcctcgtcgcatatcccccgccgcgccacagccacggccccagcacagtcgcactcgcctccgttgccgcagcagctccgccccgccaggtccttcaaacgcggggcgctcgcgcagcacgtccggtacagctttgccggcagggaggcatcgaggcggcgcacaccaggtgcttgcttcgtggtctcatccagccagccaggccttgctgccatcgatgtgccggcagcgactattcctgatgccacgacgacaagcgtcactgagcggacttcggtttcatctcttttagaggttgtatcggaggacttgctcagccttaacaacaatctgaaatcgcttgttggtgcagaaaatccagttttggtttctgcagctgaacaaatttttggtgctggtggaaaaagattaaggccagcattggttttcctggtgtctagagcaactgctgaattagctggtttgtcggagttaactgcagaacatcgacggttggcagagataatcgagatgattcacactgcgagtttaatacatgatgatgtcatagatgatagtgggatgagaagagggaaggaaactattcaccaactatatggtacacgtgtggctgtacttgctggtgattttatgtttgcacaatcttcttggtttcttgcaaacctagaaaatattgaagttataaaattgatcagtcaggtcatcaaggactttgcaagcggcgagataaaacaagcttccactctttttgattgtgacatcacacttgacgactaccttctcaagagctactacaagactgcatctttgattgcagccagcacaaaatcagcttccatattcagtggcgtcagcaccactatttgtgaaaaaatgtatgcatatggcaggaatcttggtctatccttccaggttgtcgatgacatcctggatttcacccagtcagccgaacaacttggcaaaccagcagcaagtgacttggcaaagggaaacctgactgctccagtcatcttcgctttgcaaagtgaaccagagctaagggagatcattgattctgagttcagtgacacggattcgttagctactgcaatagagctcgttcatagaagtggtgggatacggagggcacatgagcttgcaagagagaagggtgacttggcaatccaaaatctgcagtgccttccaagaagtgacttcagaagtgcccttgagaagatggtggaatacaatcttgagaggattgagtagtggattttacttgaatgctccatcaggtacatatctccatttggggtttggggtagttctcatatagatctttatattcagcccctttgggaagatacatttcactgaaaaatcagatgaatcacactatttcatacaaattctggggatagcctttgagcaggccactactatcaagttgattttgtaacagcttgtgcagaatcataagaaaccctaggacttgaccgcagccccttgcgcctacatgtatccgagcattctacttggcagttcttgtaaataatagaaccatacagtaacttagcattcttttttgttttgcaatctgagcatgcttacaagcaacaaagtgtgtgctatatttgtacggatctacgtgcacctaacatcatgcacttgtacaattgctttgcactattatgtactatttccgatttaacagtaatacggatttaacagtaataataccgttcattttctacat

SEQ ID NO: 421 - DNA, 1498 bp, Zea mays
accacgcgtccacgcctcaccatcgcagaagcgcagtaggaagccggacaaagctacgcaaggagggagaaagcgtgtaaaccatggcgtcctccgcgttcctcaacgctctcgtcctccgatcgccatcaccgtcgctctcgtcctcgtctaaccgccgcagcaccggcgccttcgcgttcccgaacccaccgcgcttcccatgcctgcgttctgcgcgtcgactcgtccttgcgagggcggcggcagcgccggcgccgggcgatggccccgaggacgagtgggggccggagcccgagggcggttccgctgtcacgggggccgcggtggcggaggcgccggaggcgagagaggtcgcggagctcaaggcgcagctaaaggacgcgctgtacggcacggagcggggcctgcgggcgtccagcgagtcacgagccaaagtgctggagctcatcacgcagctcgagacgcgcaaccccacgccggctcctacggaggcgcttacgctccttaacgggaagtggatcctcgcgtacacatcattttcccaactattcccactattggggtttggtaatctgcctcagctggtgaaggtggaggaaatatcacaaaccattgattctgagaacttcacagtgcaaaactgtatcaagttttcaggacctttggctacaacctcagttgccactaatgcaaaatttgaaattagaagccccaagcgtgtgcagatcaaatttgatgaagggattgttggtacaccacagttgaccgactccattgtgctaccagagaagtttgagttatttggacagaacatcgacctgagtccactgaaaggcatattttcttccatcgaaaatgcagcatcctcggttgcaaagaccatatctgagcagcctccgctcaaaataccgatcaggacaaacaatgctgaatcgtggttgcttacgacataccttgacgaagagctcaggatctccagaggcgatggcagcagcatctttgtgctgttcaaggagggaagtactcttctatactgagatccaaatcccgagtccatgatcgttgaagctgaaccgtgaagtagttatactgcttatgcttttctttcttatagtaatatgctccgtctcaaaataagtcaatttctagaatcacttaaagtcaaattatcttaagtttgaccaattttataggaaaggcaccatcgtctatgtctctatgacaccaaatgagtacattatgaaaaatattttatggtgcattagtgacactaattcagtgccatgctctttttatgaatttggtcaaacttaaaaatagtttgatttaagataactctgagaaattgatttattttgggacagagagaatgtttctgggttgtcttgtaaatacagttcttgtcattagagtatatgatgactaggaccggtttaatccgaattatataaactctctatatatcagcgaaccccttttttatagttaactgatc

SEQ ID NO: 422 - DNA, 852 bp, Zea mays
aaaaagaaaagagagggagaggaagcgagcggctgggcgccccaagccccacatggtgcagcgaggtccacgctaacaacttctcgaccttggcctcccacggctctgccgcattgccgcgcgccgccggccggcactcgccgtcctgacgcgagaaggaagatgctctaggaagttgggggcctggctagggacagcctgtgtcccgccgtgggatcggtgggagagggggaggcaggcatgtgtgatctggtggcccgcacgggccggcacctgcagcgctacgagaacggccgtcgccttgtggccgggtgcataccattcagatatagggatattaatgatggagcttctgatgatgaacaaaagaaacttgttgaagttctcatgatcagctcccaaagtggaccgggtcttctatttccaaagggaggctgggagaatgatgaaactgttgaagaggcagctgcaagggaagctatcgaagaagctggagtgcgaggagatttagtgagctcttatttgcttccacatgtcctgacaccacaacattttactgatggggcgctactttgttttgtgcataaagcaactgctggggttctacgatttcaagagcaagcagcccgaagcaacgtgcagagccgcaatcttcgccctgcacgtgaaggaagagctagcctcctggccagaacagagcacccggcagaggagctggctcaccgttcccgaggcggcggagcggagccgctacccgtggatgcaggaggccctcgtgacaggcttctccgcctggctcgagaactggagaaacggtggtggcggcggcggcggctgcgtggaccgaactga

SEQ ID NO: 423 - DNA, 887 bp, Zea mays
gcgcgccaaaaggcgaaaagggggcgacctggctgtaaccaatcgcctccccaccccattcttatctcctcgccaccgcttgctatccgtcgcctcgccgcgcgcgcgtacgttcggttctcggccactgctcagctctcgctgcagcgatggccctgcaggccccgtcactcatgcgcgcgccggcggcacagcggtccgcgccgccacggccctccttctccgccccgtggtcgctgcggctgccggcgcctgcgcggcgccgggtggccactgccgcgcggatcaccatgcgggtcgcgtccaagcaggcctacatctgccgtgactgcgggtacatctacaacgacaggacgccgttcgacaagctggctgacaactacttctgccctgtttgtggagctccgaagagaaggttcagaccctacgagccagcagtctccaagaacgcgaacgccaccgatgccagaaaggcgaggaaggaggagctgaagaaggaggagagcatggggaaagccttgcctattgccatcgtcgtcgggatcattgccttggctggcctgtacttctacctcaacaatgtctacagctaaacgacgaatagatccgtttggtgcggcgaacaggattcatgccgttttgcagtctttttccctttgttaatcgttgcaatgtgctgtcttggtgcatgtactactagggctccaagactgtatacaagttttgctgttcatcttgaaataccacacattacataaccagcagttaacatgaagtgttttacttacttatttccagcgtttagtttggcgttcggattcgaacaggtcatctgtgggctaaacgagtttgatcaagtaaaaatctcagcgagctttatgctgtcc

SEQ ID NO: 424 - DNA, 1043 bp, Zea mays
agatatagttaggctaggccccgggcggctcatccgcaagccagtggacgccagtgagtgaacaccagccgtcttggcccgctccttccctgctgcggccatggcgacctccgcggcgctctcgaccgccgccaaccccacccagctctgccggtcccgcgctgcgttgggcaagccagtgaaggggcttggcctggggatggggcgggagcgcgcaagccagcggagcatcacgtgccaggcggcgagcagcatccccgccgaccgcgtccccgacatggagaagcggaagctgatgaacctcctcctcctgggcgccatatcgctgcccaccgtcggcatggtcgtcccctacggcgccttcttcgtccccgccggctccgggaacggcggcggcgggacctacgccaaggacaagctgggcaacgacatcacggtggaggagtggctcaacacgcacggtcccaacgaccgcacgctcgcgcaggggctcaagggtgaccccacgtacctggtggtggagcaggacaagacgctggccacctacgggatcaacgccgtgtgcacccacctcggctgcgtcgtgccgtggaacggcgccgagaacaagttcatctgcccctgccatggatcccagtacaacaaccagggcaaggtggtccgcggaccggcgcctctgtcgctggccctggttcacgccgacgtcgacgacggcaaggtcctcttcgtcccgtgggtggagaccgacttcaggaccggccaggacccgtggtggagtgcatgaggaggatcatccgacacaagcggtgctcagtactcataggctttctccgagggcgttgttgctacaaattcacttgcctcttgcctccaaattatatatattacacacactgcatgaaacaagaacacagctgtttgtcatctcttcactataaccttttgaacactctgaaatctgctgtaatcaaatatagactttctctgccatctgctgatcaagtgaccagcagggagagcaatttagacttttttttttgccg

SEQ ID NO: 425 - DNA, 2125 bp, Zea mays
gcagcgtgaaatcgtcaccgcagaaaagaatttctgtttcccttcaatgagatggagaatccgagaatgggataagaccgcgccgcgcgcgctctcctctccgccactctcaccgtcgcctgccccgccatgacttccttgctgttgccgccgccgcaggcggctgccgcagcgtacggatgctgccactgtctcctgctcgcttctaccaccgtgccggcgaggagtgggtgcgtgggacgcgccagcagaatcacgctcgcgctccgctgcctcccgattaccgggcacaggctgaggagtcgaaaggttgcgtgccaagcgacgactgagaccgagcccgagggcaatggcgacgaggaggataagaaagagtttggagatgatgcttcatcaccttcagtttataatgttgcagaagcaaatgggccgggagaaaatgactcgagtttagacaataagaaagatgaaaccacgaatgcagaagcagcactgctgagctccggcgacacggtccaggacatggatgcagatgctacttctaccaatggcatacaagaaaatgtggaagttattgaagttgctagtggatctccattgccaggaatgaagcaacagcttgatgattctgtcaggatccccaaggctacaatagacattctaaaggatcaggtttttggatttgacacattttttgtaacaagtcaggagccttacgagggtggagtattattcaagggaaatcttcgtggtaaaccagccaaaagttatgagaagatcacaagtcggctacagaacaaatttggtgatgaatataagctttttcttctcatcaacccagaggatgagaagccagttgctgtggttatacccaagcagacattacagcctgaaactacaggtgacaaaaatttatcagtaccttcggtggcgtcggtagtgctcagagtgattcctctttatgaagaggaaaatatatactccctcaagtatcttgtatgtaagaagccacaattatctactccatctagttctaagccttacacttacagatcaacatttgacaaccttgagttgttgaaagacggactatccggtgctctagtaactggccttataataggggtgcacgaaattggacatatccttgctgccagggaaagtggaatcaagctcggcgtgccatattttgttcctagctggcagataggatctttcggcgggattaccagaatcgtcaatatcgtccgcaaccgtgaggacctactgaagctagcggctgctggaccattggccgggttttccttgggattcgttcttctgctgctgggcttcgtcttgcctccaagtgatggccttggccttgtgatagatccaaccgtcttccatgaatcgttcctcgttggtggtctcgcgaaacttcttctcggagatgttttgaaagaagggacgcagttatccataaacccgcttgttctatgggcctgggccggtctcctgatcaacgctatcaacagcatacccgctggggagcttgacggcggccgcatagcgttggccatgtggggaagaaaggtatcgtcccggatcagcagcctcgccatcgggctgctcggggtcgcggctctcttcaacgacgtcgccttctactgggtggtgctgatcttcttcctgcagaggggccccattgctcctctctccgaggaaatcacagaccctgagaacagctacatcggcatcggtgctgccattttgctgtttgggcttctggtctgcctgccctacccgttcccctttgacccgtcgcagttaactgatatggatttcaacttctgagaaaaggaaaccaaaaaaaaagcagttacaactcaccggatgagatgtatttaacctgtcggctctgtattctgctgtgtcatcttttgctccattgctccttgtagtagccaataaaagcagagctttcttgtgtaagcttgcctgttgtattagtaggatgctcgatcagagtagaatatagatgttattttggctgtaactgttacctgtcagttgtggcttatcaacaataggttccttgtcagagtatgatctatcagattcatacgcgatacttagcgttttg

SEQ ID NO: 426 - DNA, 1239 bp, Zea mays
agatagaggagggtttgcccctgcacaccgctgcgctactgggaggagcacaagtgtatcgctgtggctgcggcgcccggcagtccgccacaagcacacgcgcacacaggggccaagcgcctacacctacagaggagagacaaggtctgccgtccgcgcgtgcgcggaagaggggacggaggaagaaggctgccagcaatcagagatggaggtggggttcttgggtctgggcatcatgggcaaggcaatggcgaccaacctcctccgccacggcttccgcgtcaccgtctggaacaggaccctcgccaagtgccaagagctcgccgcgctcggcgccaccgtcggggagacgcctgcctccgtcgtctccaagtgcagatacaccatcgccatgctctccgaccccagcgccgccctatcagtcgtcttcgacaaggatggcgtgctcgagcagatcggtagcgggaagggctatgtggacatgtccactgttgacgctgcaacttcgaccaagattagcgaggcagttaaacaaaaagggggagctttccttgaagctccagtttcagggagcaagaagccagctgaagatggccaattggtcattcttgctgcaggggacaagccattgtatgatggtatgattcctgcatttgatgtactggggaagaagtcattctttctgggagagattggaaatggggcaaagatgaagcttgtggtcaacatggtcatgggaagtatgatgaattctttgtccgagggactctgtttggccgacaaaagtgggctgagcccccaaacacttcttgatgtactggaccttggtgccatcgcaaacccaatgttcaagctgaaggggcctacaatgctgcaaggcagctacagccctgcgtttcccctgaagcatcagcagaaggacatgaggttagcgcttgctctgggagatgagaacgccgtcgccatgcccgtctcagcagctgccaatgaggcgttcaagaaggcgaggagcctggggctgggagaccaggatttttcggcggtctatgaggttgtgaagggcgcgggtggttctggatctggccagccgtgatagaaggaccatttgtgactgtgttagcccatttccatgccgatttgcaacatagcgacgtacgagtacgtgtgtattcgagatttggaaccagaccatacgttgcaaaagaaataataaatcaaagagatgatgctagcttgcac

SEQ ID NO: 427 - DNA, 1739 bp, Zea mays
gacgccgagaagcccctcgatggcgaggcgaaggcgcgcagcaatcctgcctcgcttccctccaaattcccaaagctctcgcgcgcggtgccatggcggagcgcctcgccgcctccctcctccctgccgcctcgccgtccccgtccgcccgccgcgcaacggtcgcagccgcagccgccgcctctttcccctccccatgctccgcccgcgcggggctgcgcctacgctcccgcccgcccctcttctcgcagaaggcggccgggcgcgggtgtggcctgcgggtggtgcggtgcatggcagcgtcggacgcggtgcagctcaaggccgcgcgggaggacatcaaggagctccttaagagcacatactgccaccccatcatggtccgtctggggtggcatgattctggtacctatgacaagaatattaaggactggccacagcgaggtggagctaatggaagtttaaggttcgatgctgagctgagtcatggagccaatgcgggcctgattaatgcattgaagcttatccagcctatcaaggacaaatacccaggtatcacttatgcagatttgttccagttagcaagtgctacggcgattgaggaagctggtggtccaaaaattccaatgaaatatggacgtgttgatgtcacagcagctgaacagtgtccgcccgaggggaggcttcctgatgctggcccacgtgatcctgctgaacaccttagggaggtattttatagaatgggccttgatgacaaggaaattgttgcactatctggagcacacacacttggaagagcaaggcctgaccggagtggctggggaaagctagaaacaaaatatactaaggatgggcctggtgagcctggagggcaatcatggacagttgagtggttgaagtttgataatagttacttcaaggagatgaagttattttttttgaacgaaattcaggacatgaagtttttgagccagcttccctggaaagagcagaaggaacaggatcttctagttttgcctacagatgctgcattatttgaggacccatcgttcaagatcgttcttgcattgactgagaatctatggcacattcaggtatacgcagaaaagtatgcagaggaccaggaagcgttctttaaagactatggtgaagctcatgctaagctgagcgatcttggtgcaaagtttgatcctcctgagggattctcactcgacgatgacacatgctcttcaccttccgacgagaagacggaagaacctacactggtagcggtaggagcggcagtagcaacagcgacagcggacgacaacaacggcgcagctccgcagccggagcccttcatcgctgccaattactcgtatggaaagagggagttgtcggatgcgatgaagcaaaagatcagggcggagtacgaggggtttggaggcagcccggacaagcccatgcagtccaactacttcctcaacatcatgatcctgattgcggggttggcgttcttgacgtctctgctcgggaactgagtgttatatcatcatatgatccgattcctgaagtctacgagtgtccatatctacgactagcattagagctacgtacgtgcaaacagtttttttcgcgaattttggagagaaacgagcaaaagaaatgtataacgagtgttggagaaatagcgacctgactatcaacactctacctgtatgatttatctactatgaagcagtggatgcatggatattcac

SEQ ID NO: 428 - DNA, 2125 bp, Zea mays
gccacacatccgacacgtcctcgcggtagcggcgcggcactcgttctgcggtcagagtcagaacggcctaggcgctagcgataagccccgcccaccgcgcgcgcgccgcggcaccgtaccgggatgggcgccataggcatcgtcgtcagagcgtgcgcgcctctcgctcccgccgccgcggccgcgccggcaccctccggctccagctccagggacgccgctcaggcccagcggtggagcaagcccacgaggaccggccgcgtgctcgtgctcggcggcactggccgtgtcggaggatccacggccaccgcactctccaaactccgccctgacctcggcatcctcgtcggtggcagaaaccgctttgacagggagaaaggcgagtccattgcagccaagcttgggggccaatctgagttcgtccaggtcgacacccgcaacgcaggcatgttggaggaagcgctgcagggtgtggatttggttgtccatactgctggacctttccagagggcggaggagtgcaccgtattgcaggcggcgatatctactaagacaccatacattgatgtctgcgatgacacggactattcttggagagcaaagggcttccatgagcaagcaaaagctgccggtgttccagctattactactgctggcatctatccaggagttagcaatgtgatggctgctgagcttgtacatgctgccagaagtgaaaatggcgaacctgaaagactaagattcttctactatactgcaggtactggtggtgctggtccaacaattctgacaacaagttttctacttcttggggaggatgtgattgcatataacaagggagaagaaatcaaattgaagccctatagtggagctctgaacattgattttggaaagggggtcagaaagaaaaatgtctacttattgaatttgcctgaagtcaagagtgctttcaagatattaggtgtgccaactgttagtgctcgatttggtactgctcctttcttctggaattggggaatgcaggctttcgcaaactttttacctgttgagttcttgagggatagaaataaagttcagaagttggttcagtctgttgatcctttggttcgagccgttgatggtattgcaggagagcatgtctctatgagagtagatttggactgctcaaatggtcggaatactattggattatttactcataaaaaactatctgtgtaagtatagggcacaagtgaattcaacattctcgatcaatatctaattgatgtctaatatttccaattcttagctttgttactctgattatttacaaatatgacgatttacattaactatccaaaccacaatgcattttatatattgattgtttcgtttgctttacataagtttcctatgtaaaccatgtgtttctgtaaaactgggaacttcttcaggttttctcatttctttgcatccattataagaagggtaggtctggtgggtgagagttatctcactgagtcaccaggtcgtgggtttgaagtagcctctccatattttagatttaattttgtagccagaagcccataaaacaccattatgctaggagaacatcattatgcccaggaattcagaggaaattgcgtagttacattgtggttcgtttgagaacttctggtgtgctcttaagttttcttactgggtgaccagaattactagaaatgttagtgttagactgtgtgtgtgggccggcaccactgttgggctgccggcccattagggttagggttgtgagtctatatattgtaccccatcgattatcaatacatctagcagttcactattgtacatggtatcagagggctagggtttcttcttcctcccaccccacagtaacagccgccactactcctaccactactcctacctgagccgccgccgcccccgggaggctcctccctcccggggcggcacttgcacctggcgcgccgcggccctcacgaccgtcgtctccctcgcggccaccgccgcctcctcctccgtagccgctagatcagccgccgcgcgggctcgctccacgccgacgaatctccggccacacgcgctccgagaacagccgcgccggctcgacccggcctcaccccca

SEQ ID NO: 429 - DNA, 1082 bp, Zea mays
gacggcagcaaaagcacaaacgcgcacgctcatacgcaaaccacacaacccatggaagcgtcccttgccgccgccgccgtcggcttgttccctccaccgcgaatccgcatccgaatcaccaaatcgagtcccctcccacgccatcggtgcctccaatccggaccctccaagatctggacctccggttcgcgggcatgcctggtcgcggcctccgcgtccacaccgccggcgccgggaggcggcctctactcggcggcgacgtacgagctgaccccggaaaacgtcgaccgcgtcctggacgacgtccggccgtacctcatctctgacgggggcaacgtcaccgtcgttgccgtcgaggacggtgtcatctccctcaagctcgaaggagcttgcggcagctgccccagctcgacgacgacgatgaatatgggcatcgagcgtgtgctcaaggagaagttcggcgacgctttcaaggaaatccgtcaggtgttcgacggggaccagccggcggcggagacaacggccgaggcggtgaaccggcacctggacatactgcggccagcgatcgcgaactacggcgggagcgtggatgtgttggccgtcgatggcgaggactgcctggtgaggtacgacgggccggaatccatcggcagcggtatcaaggcggccatcaaggagaaattcccggacatcaccagtgtggtgtttaccctgtaaaacaccgactggggctatgcatattcggggcagtccacagcaaatgaacatgctgatcgaacttcatacttgtaatttgcaaagatttttgtgttgtgggcgggcgtctcatccttgcatttgcgatggtgcggtaattgcacatctactcagtgcggatgtttcccttcccgtcacctgaattcagttgattaggaatttcgtttcatctcgatctggcaatgatattgtgcagttgaggtcgtgtaataataatctctactctcaagagtttctttcgacctgatatttccaaaattctcttccatgttcaagttgtatatctaggaggactcggaagagacaatttgttcatgttcgaggag

SEQ ID NO: 430 - DNA, 918 bp, Zea mays
acaagccacgctctccgcttgtggctaagctgctgcacgcgcggaacgacaaaaatccagcactagccaaagcacaggcgaagaagcaggcgagaggccaccacaaacatggcgaccacggcgtttctacccccggccaagctgccgctgcaggggcgtcggttcgctagccccaaaacggcgggacgtatcagcgtcagggtccctccggcgcgagcgcagcaagagcagcaggtgaaggaggaggaggccgaggtggcgagcgtgccgccgccacaggacgcggagaagcaggcgaggaagggggacgcgcagtccctgccgcggcagcctttggcggagagcaagaacatgagccgcgagtacggcgggcagtggctgagcagcaccacgcggcacgtccgcatctacgctgcgtacatcgacccggtgaccaacgcgttcgaccagacgcagatggacaagctgacgctcatgctcgacccccaggacgagttcgcctggaccgacgaggcctgccagatggtcttcaacgagttccaggacctcgtcgatcactacgagggggctgagctgtcggagtacacacttcggttgatcgggtcagaccttgagcactacatccgcaaactgctgtacgacggggtgatcaagtacaacatgaggtccagagtcctcaatttcagcatgggcaagcctcgcatcaagttcaacagcaaccagataccagaaaagatatagaatgtacttatccaacgcccttaaaagaatggtttctctccattcgattaccgagcaagatgtatactctgcagtcccagatacgatccagagcattccagaattcatattacgcagatgcaaagccatacaccgattctgttggcagaattttgtcacccctgcacagtaataacc

SEQ ID NO: 431 - DNA, 1034 bp, Zea mays
acccaatgtcgcgtgcggccactagatttttcctgacgcggtgtctgctcccacttcccctcctctcccccaggtggcggcagcggcggcggggtagcatttgtgctacgagggcttttgcaatggcggcttcggggttcggcggcggcgaggcgttccggctctcggccgcgccgggggccggcttactgaagctgcacaagggcgacatcaccctctggtccgtcgactgcgccaccgacgccatcgttaatgctgctaatgagcgaatgttaggtggcggaggtgttgatggagctatacatcaagctgctggaccagagctagtgcaagcatgccggaaagttccagaggtcaaaccaggagtccgttgtcctactggagaagctaggattactcctgcttttgagcttcctgcctctcgggtgattcacactgttggccctatatatgatttggacaagcatcctgaggtgtcattaaagaaggcctatgaaaatagcttgaagcttgctaaggataatggcattcagtacatcgcattccctgctatatcttgtggtgtttatcgttatcctcccaaggaagcatcaaaaatagctgtttctaccgcacaaaaattttcagaggatatcaaagaggtgcattttgttctgttctcggacgacctttacaatatatggcgcgagactgcccagcagttgctatcacagtttgagaaatgaatggtccataggcagtttgctagcactagcagttgcccagcagtcgttgtctagtgttgagatgtgagcgccataggcagtttgcctggtgtaataaaaatgggtgtatcagacaacgtttaaatcttgatgaaaccgtgtattgcacctgtggtataatgctgaatgagtaaagtttggcgataccgagcagttgcaatactacctatcagcatgcctccggtatttgttgtgcaatgcaggtactgtgaccagtccaacggttcctgtcatgcacacccattgtaatgtttaggatgatgttgcttg

SEQ ID NO: 432 - DNA, 924 bp, Zea mays
aaaacccaaccaggccggcgtccaggtgtccacagaaagaggagagcagagagagcgggagatcatggagctctgcgtctctaccactgcctccgtccgcgccaccgccgcgcccatatccttcgccccgccccggcgaggcgcgtctgcttccaccgccctcccgctccaccgccgaatcccaactcgaggctggtgttgcgccagcgcggccgtgcctgacccggcgccctccgaagagctcgcatccgcctcctacaccgtcgtcgtcgcggacaagcccgattcgcctgccgatgacaaggtcgacgaggttagcgccgcgcctagtggctccgcggaggcgcccgtagcagaaccggtgtcatcagaggcgtccccgtccccgtccacggatgacggcggtctggatgagatactaagcaagttgaacattgaagtgactccgattttaatcctcactggatctggtgcctttgttgctttatggatcctatcttctgttgtttctgcagttgattcagtccccctgctcccaaaattgctggaattagtaggaactggttactcaatttggttcaccgcacggcatctccttttcaaggaaagcagagatggcatgtttgcaaagttcaaggatatcaaagagaggatcatttgatctaccatcgatatctggtcacgtgtttaggctttacagcctgcttattattaggttttctcccctttcaaatattactgaaggggtaaagaaggtcgtatatctaatttttcttctcacggggtctgtcattaggcttctcaagtttggctagtgtgcttcttcaggtcactctcgatgttttttactcaatcctatgtgtatgctgccgaataaagctttaaaaagatgaatgcaattagtatgttctcgctcctatgcaa

SEQ ID NO: 433 - DNA, 1716 bp, Zea mays
ggaacccgttaacgctgtgggagtgtgagcccacccggccacccgtttcggctaatcccccgctcgccttctcccatcgccatggctgccgcttcctggtccgcgcccaccacctccttcgcgccggcgccggcgccgccatgggggcggtggaggaccaaggcggcgcctttacccatcaggacgcttccccgccgagtgcttctcaacgcagttggcgaatccgccatggttgctgctggtgacacattgcttggtttgtatgagaaagagcggttaggcctgttgcagtatgccgacgacgagtctaaagaagagaggtactgggaaaccttggatgctgatttgcgttactggaccagatccctgcgcccagtgcagtggtatcctggtcatattgcaaaaacagagaaagaattgaaggaacaattgaggctcatggatgtcgtcatagagatccgtgatgctaggattcccttgtccaccagccatcctaaggttattcttttggtgattgccatatttatctgtacaaaagaacaacttcaaattgtactgagtcatgttatgtatgatcagatggactcatggctaggcaaccggaaaaggatcatagtcttgaatcgcaaggacatgatctcaactgaggatatgaatgcatgggctacttactttggtaatcagggcatcaaagttgttttctccaatggccagctgggtatgggtacaatgaaattaggtaggatggcgaaatcagtagcatctgttgcgaacacaaagagaaaggagaagggattgcttcctcgtccggttcgagctggaatagttggatatccaaatgttggcaaatcttccttgattaatcgcttgctaaaacgaagaatgtgcccagcagcacctaggccaggtgtcacaagagagctgaagtgggttcgttttggaacagacctagagttgttagattcacctggaattttacctatgcgaattagtgaccagacatctgcaatcaagctcgctatatgtgatgatattggagaaaggtcatacgattttgctgatgtggcggcgattcttgtgcagatgttgataagacatcctgcagtaggttctgaagcatttcgaagacgatataagattgatgtagatagtgagtgcggtaaaacgtttgtcacaaagctctctgttcacttgttcaatggagacacaagccaggcagctttccgcatattgtctgactacaggaaaggcaaatttggatgggtagcgctggagagacctccaacatgaacaagcgggatatcatagatccttagataaaagacatgtgcttgttcatgtagtatcacacaatttagtgtcgttcattggaccactctcgacagttttcactggacctgcacatatacgaggaattaattcagaatagctgtccatctgatgatctaaagacaaaacttaagaaatgctcctgctgttatcagacagtccagagcaaacgagctgatttgtatgatctattgaatgagctcaactatgtttctatgtaacggaattaggtttgagaaatgaaagattgtatgtctcctaatttagttgctcatgtactttgttcttttaggaaaagttgctcctgtacttctggatgattcattagattcgggaactggtgtaacattttaggcccagacaatagacatccctctacaaattcag

SEQ ID NO: 434 - DNA, 3748 bp, Zea mays
ctctctctcctccccttctcctttctcccgcgccccagatccgagccccggcgcctgaggccatggcgagcgacagcgacgtcgacgaggacgagctcctccagattgcgctgcaggagcaggcggcgcgggacctcagccaccagcgcccgcccgccgccaacaagcccgtcgtcaacctcgtccgcccacccgcccccaacgcccgcggcggcaacggcagagccgggggcgccgcagcgaaggcgcgccagcccagccgcggcggagacgaggacgaagactcagatgttgagctgctctctatctcctctggcgaagaggacgacaatccccgcgctcgtggcccgccgccgccccgcgggggtgggggtgggcgcgctggggcgcggagggccgtggcacgggacgatggggacttcgacgatgaggagcccaggagctggaagcgcgtcgacgaggcagagcttgctcgtagggttcgagaaatgcgtgaagcaaaggtggctcctaacattcaagaacttgatcagaaagcagcagcagcagctgctgctgctcgaaaggccctcacgtctgtacagactttaccaaaaggagttgaggttttggatccattgggccttggtgtcatagataataaatccctgcgattgatcactgatgcttcagtaagttctccaatttcaagggagaagtctcaaggtttagatcccaatatgcgagacaaagttatctattcatctccaagttttgatcccaaagttttcctttcgtgggtccacaaagacacaagcgctgctgatttagaggctggtgctctcactttgaaaactgatctcaaagggagaacacagcagaaaaaacagttagtcaaggagaactttgattgttttgtctcgtgcaaaactacaatagatgacattgagtcaaaattgagacagatagaggaagatcctgaaggtgcaggtactgctcacttgtattcagtgacacaaaaaattagtggtgtggcgaatcgtgcatttgagcctctatttgagaggcaggcccaagctgaaaagatcagatctgttcagggaatgcttcaaagatttcggacactatttaacctcccaagtgcaatccgtgggaacattagaaaaggagaatatgatcttgctgtcagagagtaccaaaaagcaaagtcaattgttcttccttcccatgtggggatactaaaacgtgtactcgaagaggtcgaaaaggtgatgcaggaattcagaggcatgctttataagtccatggaggatcctcaccttgactttgctgagaatagcaggattcatggattgtttgaaaagtgtactcaagatcatgaattgcgaatggaagttttgcaaaataaaattcgtgaaaaagtgctctctgattcaaagtggaggcagctgcaacaagattcaaataaatctctggaagttgattctgccatttgtgattctcctcgagctgatcagttgtcaacaaactttatggctgaggaagctgatagtttaagggccacctacactcgtaggctaacttctgtgcttatacagcatgttccagctttctggagattagctttatctgttttcagtggaaagtttgccaagacagcttctggtaatgtagtttctgattctgacatgaatgcaaagccgtctgcaaataagaacgatgacaaaggtggagatgtgaagtacacaaaccacactctcgatgaagttgctagtatggttcgggatactatatcggcttttgacactaaggttcagagtaccttccgtgatttcgaggaatgcaacattctttgtccatacatgagtgacactataaaagaaatagctaaggcctgtcagactcttgaagggaaggattcatctccaactgctgtaaaattgttgcgcacccttcattttcaaatgacgaagctttacgttctacggctttgttcatggatgcgggcaacaactaaggagatatcaaaagatgatacttgggttattttatccacccttgagagaaacaagtctccatatgcaatttcatgcatgcccctggaattccgtgacataataatttcagcaatggaccggattgatactatgattcttaatctgatgagcgagactgcgaagtcatatgacatttctcaaccacttcaggaaattaatgagtctgtcagacttgcatttttgaattcctttctggattttgctggttatctggagaggtttggaggtgaactaactgagaacaggccaaacaatgaaaacaattatgttcaaaatggatacataaatggtactagagaaacatctgctaacacagatggagatttgcacaaaaagctgctggttgttttgagtaacattggatattgtaaagctgaactttcagaagaactgtacaccacatatagacacatttggtctccagtcaggaataatgatgagcgaagttctgacatgcgagatctgatgacttctttctctgcgcttgaagagaaagtcctggaccaatatacttttgcaaaggtacttaccccatcaaacccactccaatttctttcacaaccagaagaacttgctgttaaagataggatcttgtcaaacttgatcagaagttctgcacaaagttatcttttggatcctgggatttattggggagcagcaccaatggtaaagagcattcgagatgcaactcttgacttgctgcacatccttgtagcagtacatgcagagatatactctggtgctcggcctttgttggagaagacaatgaaaattttggttgagggtttggtcgacatctttcttagtgtttttcatgagaataagaccaaaggtattaggttgttggatgcaaatggtttttgtcaactcatgcttgagcttgagtattttgagactgtgctacacacatacttctcacccgaggcacagcaggctatgaaatccttacaagagaatttgttggaaaaggcctgtgaaagtattgcagaagccatggaaaatcctggacaccaacggcgaccaacccgtggcagtgaagatgcatcgtcagatgatagacagccatcagtatcacctgatgatttgcttttgcttgctcaacagtacagtagtgatctgctgcaaggggagctggagaggactcgattgaacatagcctgcttcatggagtcagcccttcaatcaacgtctgcgccagcaggctcaaagcctgctgcatattcttcttaccatgcgcaagtaccacagcacgcccccattcaaacgtcctcgcctagttttagaaggcagcagactggtacaagctctcctgtagtctccagacggcgacggtgagcgtagtgcatcttccctggaatttcctaccacccctcatgtttttttttatttcttgtaattatcatcctgttgtcatgtgttatgaattttgatccattcttttggtgtcgtaagataaaaatggtggtcaagtgcttctgcacgggaacataaaattgtataatatgcccacgaatcaaatactgccttgctgactgaagatagcaccacagctgtatctgctgcgccagtctccttcggtcctcactgcttgtttgtatattcatttggacagtttatgtatcccgacatttgttaatgttgtatcaggtggttcaactagcatcgggataattttcttatatcgaaagcggctgaagtgattgagattcaac

SEQ ID NO: 435 - DNA, 1605 bp, Zea mays
gcagtgccgcaggtacaccaatcgcttcgtccccgcgtctcgccgcgtagcggcgtaggcgccacagaaactcgcacgccgctccccgccgtccggcccgagtcgccgtcgctgccgaatccaatccatggctccgcccgccgcacccaccgcgctgcaccaccgcacgcccctcctccttccccgccgcaccgtcgccttgggtgccaccgccaccgcgcgcgccgccagggccgcttctctcgccgtcagggcccagccggacaccaccgccgcagccgtctccacctccgcgcctgagccggcgcccgagttcaagcctccgccggggttcaaggcgcccgagcccaagaggtacgaggtcaagtccggccaggtgggcagcgtcctcggcgcctcgctcgccatcccccttcgcctcggcaccggcgtcttcgtcctcgggtactcgccatctcttgtttctccatcagagataccatcagaccagtatgcactggaatttggagcttggaaggtgaaagaggaatcaaaaataggacagtgcaaacgaccagaaaagcctatcgagatatatgaatttgaaggttgtccattttgtcggaaggtcagagagatggtaacagtcttggacctagatgtattattttacccctgtcctcaaaaaggcccaacattccgacctaaagtcctcgaaatgggtggaaagaaacaattcccttacatggtatgcagacgcgatggaactgttccaattatgctatcacttggtctgttgacagcaattacagcagggcttgctactcttggtcgtattggaaagggaaattcctacattgcttcaaaagtcccaccgcagcccatagagatatgggcatgtgagggatctcccttctgtaaattagtacgagagacacttgtcgagttggaattgccacatctgctacacagctgcgcacgaggcagccccaaacgacaagaatttttcaagaaaaaggggcttttccaggcgccgtacatcgaagatcctaacacgggagtccagatgtttgaaagcgctgaaatcatagactacctgaaggcaacatatgccctgtacccaagctcgtagtgatgtatcagaaatggtcattgtaatgttgcgtgtagattcagttcttcccggtaataaaaggaaaagaaatagtgggccacgcattctgtatgatgcacagccgattttgtctatgcagatctaaactttgaagttacttcgtgttgacactttttcggagcgccaaatactcaagaagaaccgacggcggtgctctttggtcaggcacggacggtccgcggcctggggccggacggtccgcgacctgacgcatgggctaaggtttcctgcctgacggccggacggtccgcgctctggggccggacggtccgcgcgtgcgcagaggcggcggaagatcgccggcggcgcttggacttgctcccgggagggaccccgtcggggaggagagatcctaggggttgtctaggctcgggccgaccgacctagactcctctaatcggcgtagagtcgaagagaggcgaagaatttggggatcgacaggctaaacctaa

SEQ ID NO: 436 - DNA, 1721 bp, Zea mays
gatgctcgggctaatgtgaactattcaatcagtttcttcgctagaacatccaacggctgagatcgcgtgcgcgcaaccctaggcaccagatcacaggtactgggagctccgccaccataagtagatggctccgttagggttgtttttgctactctgcttctgctctcacctgtttcgctgctcgcccgatctcgcgctgccggtactgcatgctaacagtggtaacaaaaatgcattcaaaacactaattgccgcagaatacagcggtgtcaaggttgagttggtgaaggactttcaaatgggtgtctccaacaaaactccagagttcctcaagatgaaccctattgggaagattcctgtcctggagactcctgatggtcctgtttttgagagcaatgcaattgcaagatatgttactcgcttgaaggctgataacccactttatggatcttcactgattgattatgcccatattgagcaatggattgactttgctgcaacagagattgatgcaaacattggaaagtggttgtacccacggatggggttttatccccatgctggtgtggtagaagaatcaactattgctgccttgaagagagcattgggttctctgagcacccatcttgcatcaaacacattccttgttgggcattcagtgactctcgcggatatcgtgatgacatgcaatctctgtatgggatttagccgtatcttgactaagagttttacctcagagttccctcatgttgagaggtatttctggaccatggttaaccaaccaaacttcaaaaaggtcattggtgacgttaagcaggcagaagctgtgccacttgttccacagaaggctgctccagccaaagtgcagaagcctaaggaaaccaaaaaggaggctccgaagcccaaggtaactgagaaatcagcagaagaagaggaggcaccaaagcctaagccaaagaaccctcttgatttgcttcctcctagcaagatgattcttgatgattggaagaggctgtactctaacacgaaaaccaacttccgtgaggttgctattaaaggtttctgggatatgtacgacccagagggctactccctgtggttctgtgactacaagtacaatgatgagaacacagtgtcgtttgtgaccatgaacaaggttggtggcttcctgcagcggatggacctgtgccgcaaatacgcctttggcaagatgcttgtggtaggctctgagccccctttcaaggtcaaggggctctggctcttcaggggctcagaaattcccaagtttgtcatggacgaagtctatgacatggagctttatgagtggaccaaggttgacctctctgatgaggcacagaaggagcgggtcaatgccatgattgaggaccaggagccattcgagggcgaggccttgctggatgcaaaatgcttcaagtgaggaaagagtttttgggtccaattctaaaacagccatggatgatagcttttgatatggcgtgctggttatgattatgctgtggagttttggccatgttaacgggaggtcgtgctcgcgaaaccttctgcattatcgcatcggaatcgtttgtcatgtgcatcctagtgaatagatatattatgaaaatatatctcctgaaatttaatgatatttattttattttataacgatttatactttttatttaatatatattagtcaaacttgacatgctttaattcaa

SEQ ID NO: 437 - DNA, 1170 bp, Zea mays
gcctcactccagtcgtccggttctgttccagcagccccacaccccacgccaccggaccggaaacgcgaagcagccccacactgcccacgcggacacgctctgcaccaccacctgccggccgttcccggctcgccgctgccgttgcgccctcgcgctcacacctccgccagcccaggtccatcgagcggagaaacccatggccccctcgccgatcctcgtccggccgccggcgctggcgaattcaccccttccgcctccccgatgcgtggccgcggtagcagcggcgccggcggttcggacggctccagcggccccattctctaggctccgtaccaagtgtaggttcgccgcatcggatattgtggtgttaggaggaagtggattcgttggttctgcgatttgcagagctgctgtatccaaaggcattgaggttgtgagcttcagcaggtcaggaagaccatcttactctgatccctgggttgatcaagtcaattggctgccaggagtcccaaaattcattttaatctccgtccatgactacaaccttccatcctttcttcttacatcgggttacttcactggcaagagaaaggcagaatctgaagtcctttccaaatacccagcctcgggtgtcgtgttgaggccaggcttcatttacggtaaaaggaaagtaaatggcttcgaggtaccactcgacgctgtcggacaaccattggagaagttgctctcctctgtcgaaaacttcaccaagccgttgagctcgctgcctgcctctgacctaatccttgcaccccctgtgagcgtggatgatgttgcctatgctgtaatcaacggagtcatagacgacagcttctttggggtgttcacgattgaacagatcaaggaagccgcgtccaaggtacgagtgtgaacccggggtcttgttccacaatctctgaacgtgtgttgtaggtggaaagttcataaacttagcagtaactcattgatccttgtgttctttatttctcgctgaattttgaccatagtcaaccgttcaaaagtcagtgcagcattcttttttctgctggaatctcttgagaaaatatagtttccaaactagcccttaatgacttaaagagctagcaaaatatgtagtactgtgtgggtcaccgaactgttatgttggttcac

SEQ ID NO: 438 - DNA, 1860 bp, Zea mays; identical to SEQ ID NO: 371

SEQ ID NO: 439 - DNA, 1606 bp, Zea mays
atggcgctgccatccatgagtcttgtggcaaagggtgtgcttcccttctcagcacgtacctcgagtggtgtcacacaaaggccggtgtcagtgactgcttccttggagcacaaaaccagcgatgccagaaggaagttcctaaaacttgcgcttgggaaccttggagttggactgcccaccttgttgggcgctaagaaagctctcgctgatgagcaaggcgtctcgtcctcgaggatgtcttattcgaggttccttgagtatcttgacaaggatagagtgaagaaggttgatttgtttgagaatgggacaattgctattgtggaggccatttctcctgagcttggtaaccgcgtgcaaagagtccgtgtgcagcttcctggtctaagccaggagcttcttcaaaagttgagggagaagaacatcgattttgctgctcacagcaaccaggaggactctggttctcttctgttcaaccttattggaaatttggcattcccgcttatccttatcggtggtctgtttttactttcaagaagggcacagggtggcctcggtggacccaatggtcctggctttccccttgcaatgagaacacctgggttcagcggagcagacttggcaaaccttctgaatgaagcagccattctggctggaagacggggaaggacagcaatttcttcaaaagagattgatgattctattgacagaattgtagctggtatggaagggaccgtgatgacagacgggaagagcaaaagtcttgttgcttaccatgaagttgggcatgcaatttgcggaactttgacgcctggccatgatcctgtccaaaaggttaccttagttccaaggggtcaagctcgtggtcttacatggtttatcccgatggatgacccaacactcatctccaggcagcaactttttgccagaattgttggcggccttggtggtagagctgctgaggaggtcatatttggagagcctgaggtgaccactggagctgctggtgacttgcagcaaattactggcttagccaagcagatggttgtgacattcggtatgtctgaaattggtccatggtctctgatggagggtggagcgcagagtggggacgtcatcatgagaatgatggcaaggaactccatgtcagagaagctcgcggaggacattgattcggccgtgaagcagttgtcggatgaggcctacgagatcgctttgaggcacattagaaacaacagggaggccattgacaaaatcgttgaggtgctcattgagaaggagacagtgaccggagacgagttccgggcgatcctttctgagtttgccgagatccctgttgagaaccgggttcccccagccacaccggcggccgcgctcccagcctaaaccctagccttgtaggggaggattttcttgttgtatggtgttcatattttggattcttggtgtacactaactctactaaatctgccggattttcggtacacgacatgtaagatgtaacttactcatggtgaattaatagtaaaatgtaattagattaaaataataggcctggcgcaacattttcagtttgtagcttcgcttctggcgagcgaaatctcttgct

SEQ ID NO: 440 - DNA, 1020 bp, Zea mays; identical to SEQ ID NO: 346

SEQ ID NO: 441 - DNA, 1424 bp, Zea mays
gggtcgctgtccctcgcctgccccgccgcccctagccctttccccccgtgtccggtggttgcggctgcccgcatcatattcccaccttgcgaacgaggacgaactgctaccccctcgcctcgccctcgccgcctgctcctctccagttctcccccaccaaccgcagcagcgagagcgagactgagaatggccgcggcgccgtcgtccctcgtgtcctcccatctctcccgcctcgccgacctccgccgcgcggcggcgccggccactcccaccgtcccacagcagcttcgcgtcggcttctcgcgccgccgcgcccagcgcgtcgtcgccatggctggatccggcaagttcttcgtcggaggcaactggaagtgcaacggaacaaaggactccgttagcaagcttgtctctgaactgaatgctgctaccctcgaaactgatgtagatgttgtggtggctcctccattcatctatatcgatcaggtcaagaattcactaacgggtcgcattgaggtttctgctcagaatgtgtggattggaaaaggaggagcctacaccggagagatcagtgcagaacaactggtggacatcggttgtcaatgggttattcttggacactcagagcgtagacatattattggtgaaaatgacgagtttattgggaagaaggctgcatatgcattgagccaaaatgttaaggttattgcctgcataggagagcttctggaagagagggaagcagggaaaacttttgaagtatgttttgagcagatgaaggcttttgcagatagtatttcaaactgggccgatgttgtgattgcatatgagcctgtttgggctattggaaccggaaaagttgctactcctgagcaagcccaggaagttcatgctgctgtacgcgattggttgacgaccaacatatcacctgatgttgcctctagcacccgaataatctatggaggttctgtgaatgcagccaactgtgcagagctagcaaagaaagaggatatcgatggttttcttgttggtggtgcctccttgaaggccccggacttcgccaccattatcaactcagtgaccgccaagaaagttgcagcctgatggaccaccctgtgaagaaataagaggccatcaccgtgtcgcctcatctgccacgccttaaagcctgtaggaggcgtcacctcctgtttttgctgatttgcagcacggggacagaaaataatgttttgctctcgtggatctgcacgtgacgaggagagttcagttgtcgtgagcgatgtacgttgggaatattgttatgtggtccttttctaaagaaaaaaaaatgttgacagtcaaggagaaatgtaagcgtgtttttttttaacagagaagctacatcttactgtgactgtgagtgttccatcactcgattctttcctttt

SEQ ID NO: 442 - DNA, 3687 bp, Zea mays
acgcgcgaggcgaaaagcgggcgggtggaagaagcgtgggcgcctgggttaacgctcccgcagcgagtgatctgagagcggtagaggccggccggaaccgcggaagaggagaggccgggggatccgacgatggcggggaacgagtggatcaatgggtacctggaggcgatcctcgacagccgcacctcgtcgggcggcggcggaggcggcggcggcggggacccaaggtcgccggtggcgggggcgtcgccgacgaagggggcgagcccccgcggcccgcacatgaacttcaacccctcgcactacttcgtcgaggaggtggtcaagggcgtcgacgagagcgacctccaccggacgtggatcaaggtcgtagccacgcgcaacgcccgggagcgcagcaccaggctcgagaacatgtgctggcggatctggcacctcgcgcgcaagaagaaacagctggagttggagggcatccagagaatctcggcacgccggaaggaacaggagcaggtgcgtcgtgaggcgacggaggacctggccgacgatctgtcagaaggcgagaaaggggacaccctcgctgagcttgtgccggttgaggcggccaagaagaagttccagaggaacttctctgaccttaccgtctggtctgacgacaataatgagaagaagctttacattgtgctcatcagtgttcatggtcttgttcgtggcgaaaacatggaactaggtcgtgattctgacaccggtggccaggtgaaatatgttgtcgaacttgcaagagcaatgtcaatgatgcctggagtgtacagggtggacctcttcactcgtcaagtgtcatctcctgacgtggactggagctatggtgagccgaccgagatgttatgctccggttccaacgatggagaggggatgggtgagagtgccggagcctacattgtgcgcataccgtgtggaccacgggataaatacctcaagaaggaagcactgtggccttacctccaagagtttgtcgatggagctcttgcgcatatccttaacatgtccaaggctctgggagaacaggttggaaatgggaggccagtactgccttacgtgatacatggacactatgccgacgctggagatgttgctgctctcctttccggtgcgctcaatgtacccatggtgctcactggtcactcacttgggaggaacaagctggagcaactcctgaagcaagggcgcatgtccaaggaggagatcgattcaacatacaagatcatgaggcgtatcgagggtgaggagctggccctggatgcgtcagagcttgtcatcaccagcacaaggcaggagattgatgaacagtggggattgtacgacggatttgatgtcaagcttgagaaagtgttgagggcacgggcgaggcgtggggttagctgccatggtcgtttcatgcctaggatggtggtgattcctccaggaatggatttcagcaatgttgtggttcatgaagacattgatggggatggtgacagcaaagatgatatcgttggtttggagggtgcttcaccgaagtcaatgcccccaatttgggccgaggtgatgcggttcctaaccaatcctcacaagccgatgatcctggcgctgtcgaggccagacccgaagaagaacatcactaccctcgtcaaagcctttggagagtgccccccactcagggaacttgcaaaccttactctaatcatgggaaacagagatgacatcgacgatatgtctgctggcaatgccagtgtcctcaccacagttctgaagctgatagacaagtatgatctgtatggaagcgtagcgtttcctaagcatcacaatcaggctgatgtcccggagatctaccgcctcgcggccaaaatgaagggtgtcttcatcaaccctgctctcgttgagccgttcggtctcaccctgatcgaggctgcagcacacggacttccaatagtcgctaccaagaatggtggtccggtcgacattacaactgcactgagcaacggactgctcgttgacccgcacgaccagaacgccatcgctcaagcactgctgaagctcgtagcagataagaacctgtggcaggaatgccggagaaacgggctgcgaaacatccacctttactcatggccggagcactgccgcacttacctcaccagggttgctgggtgccggttaaggaacccgaggtggctgaaggacacaccagcagatgccggagctgatgaggaggagttcctggaggattccatggacgctcaggacctgtcactccgtctgtccatcgacggtgagaagagctcgctgaacaccaacgacccattgtcgtcggacccgcaggatcaggtgcagaagatcatgaacaagatcaatcagtcgtcagcacttccgccgtccatgtcctcagtcgcagacggtgccaagaacgcaaccgaggccacgggcagcaccttgaacaagtacccactcctgcgccggcgccggcgcctgttcgtcatcgccgtggactgctaccaagacgacggccgtgctagcaagaagatgctgcaggtgatccaggaagttttcagagcagtccgatcggactcccagatgtccaagatctcagggttcgcgctgtccactgcgatgccgttgtccgaaacactccagcttctgcagctcggcaagatcccagcgaccgacttcgacaccctcatctgtggcagtggcagcgaggtctactatcctggcacagtgaactgcgtcgacgctgaaggaaagctgcgcccagaccaggactatctgatgcacatcagccaccgctggtcccatgacggcgcgaagcagaccatagcgaagctcatggccactcaggacggttcaggcgacactgtcgagctggacccggcgtctagtaatgcacactgcttcacgttccttatcaaagatcccaaaaaggtgaaaacggtcgatgagatgagggagaggctgaggatgcgtggtctccggtgccacatcatgtactgcaggaactcgacaaggcttcaggttgtccctctgctagcatcaaggtcacaggcactcaggtatctttttgtgcgctggggcctatatgtggggaacatgtatctgatcactggggaacatggcgacaccgatcatgaggagatgctatctggattacacaagactgtgatcgtccggggtgtcaccgagaaaggttcggaagggctgctgaggagcccaggaagctacaagaaggacgacgtcgtgccgtctgagacccccttggctgcgtacacgactggtgagatgaaggccgatgagatcatgcgagctctgaaacaagtctccaagacttccagcggcatgtgaattagctgctgggaaaggtcgatctctaatatattcttcttgttcataactcaaacggcagacacattttctccttttcttcactagtactacataaataacttgtgaacagtaccgagggtgtatatattgcagtgacaaataactaggacactgctaattctactgctggctcaccactgtcttggtgagatgtagccctacaagattgtatactgtgtatttctctagtcgcagctaggcatactttgttttttaaaaaaagaacttcagtttactgcatactcaaggaaacgaaatgacagtaaaagtcagggt

SEQ ID NO: 443 - DNA, 1762 bp, Zea mays
gtccacacaacgcacgcgaggtccatcgctcctcctctccgtcaccgagaaaatgtcggtctcctccccggccatggcctcgccccctctcgccgcgcccggcactcaccgcggcccctgcttctcgaccctctgccgcttaccgtcgccttcctgctacccgcctctttcggcttcctcctcaccggctatctccaccgtctccgcattcgctgtcctcaaacacaagcccagaggtctgggactaaggtgccaggccgcggaggaggcaccaccgccggcgcggggtaagacttcgctcaaggtgatgatttcgggagctcccgcctcgggaaaaggaacgcaatgccgcatgatcgtcgagaagtatggtttagttcacatatcaactggtgatcttctgcgagctgaagtatcttctggcacagaaattggcaagaaagcaaaagaatacatggacaatggaaagcttgtgccggaccaagttgtgacagatatggtggtatcacgactgtcacaaccggatatacaagaaagagggtggcttcttgatggttacccaaggagcttcagtcaagcacaacaccttgaaaatttgaaaataagaccgaatatattcattgtgctagaagttcctgatgatgttctaatcgacagatgtgttggaagacggctggatcctgtgactggcaagatttaccatttaaaaaactaccccccggagaatgaggagatttctgcccgacttattacacgttctgatgacacatttgagaaggttaaatcacgtcttgatacgtacaagcaaaattctgaagctattcttcctacatactctgatttgcttaataagattgatggaaactgcccagccgaagttgtttttcaggcgatagatttcctgttacagaagatctgtgagaacacttcagcgagcaagttgaccaaaacaaatggaaaacgaccagattctgcggatacaggttcaaaaaatgagtggcgtggaattccaacgaggttgaataacattccacattctagggaaattagggaatacttctacaacgacgtgttaaaagctacaaaacttgctattgaagataaaaagactcggttgcagatagatatcaatattcctgaacttaaccctgaaatggatgtttaccgcataggaaccctcatggaacttgtaagagaactttctctatcctttgcagatgatgggaaacgtgtcaaggtctgtgttcaaggctccatggggcaaggtgcatttgctggcatcccacttcaactggcaggaaccagaaaaattttggaattcatggactggggtgactatggggcgaagggcaccttcattaatattggagcagtagccgaggttgggtacagagcctccactctcttctgcatggatatgagagctatgactgatgctgctggtgatagacctgtgattcttgtaaatcctcgcctaaaggatatgcctgcatcaagtggtgttatgcaaacaatgggaagggatattaggctgaagtatgctgcatcatttgagacatgctattcattccgtcttctctactacgctggttcattctatcctattatgggagctttaaggatggcttatccaaataaatatgagatttatcgaagggttgacactctcaatggaaaagagaactatattcttatagctgaattcacgaacaagccaactcctgatgagatcaccagtgctttcaaaggacaaaaaaggtaa

SEQ ID NO: 444 - DNA, 2153 bp, Zea mays
gctcactcagggaagcttccataccaccagcccaccaccatgccgaccgtgctgagcacaaggcgggccgcatcgccggagacgatctccctcccctcctctcgttcctcccactctcgcacggcgagcccgctccaccccgtctcccgcggcaaccgagcgctccgtcttctcgccgcgcttcgctccccgtccgcgccgcggccgcggctgaggcgtaggcccggcctccctcccgcccgcgcggggctcgccgccgccgcggcaatgccggcgccggagaccaaggcgcgcatcctggtggccggcggcggcatcggcggcctggtcttcgcgctcgccgccaggcggaaggggttcgaggtgctggtgctggagcgggacgtgagcgccgtccgcggggaagggaggtaccgcggcccgatccagctgcagagcaacgcgctcgccgcgctcgaggccgtcgacgccgccgcggccgacgaggtcatggacgccggctgcgtcacgggggaccgcgtcaacggcatcgttgacggcgtttctggctcctggtacatcaagtttgatacgtttactcctgcagctgagcgggggctcccggtcacaagggtcattagccgcatgacgctgcaacagatccttgctcgagcagttggcgatgacgctatattgaatggaagccatgtagtcgattttacagatgatggcagtaaggttactgccatattggaggacggtaggatatttgaaggtgaccttttggttggtgccgatggaatatggtcaaaggtgaggaagacactattcgggcactcagatgccacctattcaggttacacctgctacactggaattgcagattttgtgccgcctgatatcgatacggttgggtaccgggtatttctgggccacaaacagtacttcgtctcttcggatgtcggtgccggtaaaatgcaatggtatgcttttcacaaggaagaggctggtggcactgaccctgagaacggcaaaaagaaaagattgcttgagatatttgatgggtggtgtgataatgtcatcgatttggtaaacgcaaccgacgaagaagcgattcttcgccgagatatatacgaccgcccacctactataaattgggggaaaggtcgtgtcaccttgctcggcgattctgtccatgctatgcagccaaatctgggtcaaggtggctgcatggctattgaggatggttaccagctggccgtagaactagagaatgcctggcaagagagtgtcaagactggaactcctatggacatagtttcctccttgagacgttatgagaaagagagaagggtgcgtgttgctgttatacatggactggcaagaatggcagcaatcatggctaccacctatagaccgtatttgggtgttggtctaggacctttatcgtttttgaccaagttgcggataccacaccctggaagggttggtggcagattcttcatcaagtatggaatgcctgctatgctgagctgggtgcttggtggcaatagctcaaagctagaaggaagacctttaagctgccgactttctgacaaggcacatgacgagctttatcggtggtttgacgatgacgatgcgctggaacaagctatgggtggagaatggtacctcttcgcaacaagtgaagcaaacaacaatagcttgcagcagcccattcgtttaattagggatgagcagaggtcactctctgttggcagccggtcagatgctaatgactcagcttcttccctatcattgccctttccacagatatcagaaaggcatgctactatcacgtgcaagaataaggctttctatctgactgatctcgggagtgaacatggtacctggattaccgacaatgaaggtagacgttaccgcgtgccaccaaacttcccggttcgtttccatccttccgatgtcattgagtttggttccgataagaaggctatgttccgggtgaaggtgctgaacacgctcccatacgaatcagcaagaagtgggaagcagcaggggctgcagcaagagcaagtcctccaggcagcatgaatggagacaccagtcaccatcccatcatcagcgacactgtactgtatagcaatcgggagatacacgatactccaacgcgtaaa

SEQ ID NO: 445 - DNA, 1433 bp, Zea mays
gcgagacgcgcaatgggaatcatccgacccgagatcgctttccattcccatcgcttctcttctccacacgaactcactcttgagagatagagcgaaacacaaagcaggcaaaaaaaaaaaggatagagagaaaaaatcattctcgtttctctcactccgctatacccccgcccgaatcgatggagattagggctccgccaacgagcctcagtctcgcgccgccgcccgcctccgccagcttccgccgaacaccgcttaggaccttcttccttaacggcagcgtttcacttaaagttgtgcaagtacgacaatcaaatgtcaacagatttaagtgcaatagcatacaaagtaacctctttgatagactaacgagggttgccaggtcctacgcaaatgcagttctaagttcatttgaggaccctgagaagattctcgagcaggcagttctcgagatgaacgatgacttgacaaagatgaggcaggccacagcacaggtcttggcgtctcaaaagcggcttgagaataaatacaaagctgcagaacaagcttctgctgattggtatcgaagggctcaacttgctcttcaaaagggtgacgaggatcttgctcgcgaagcccttaagcggcgtaaatcatatgctgacaatgcaagctccttaaggtcccagcttgatcagcagaagggtgtagttgaaaatctgatttcaaatacccgggttcttgagagcaagatagcagaggccaagcagaaaaaggatacgcttaaagctcgtgctcaatcagcaaagactgccacaaaagtgagcgaaatgttgggcaacgtgaatacaagtagcgccctttctgcatttgagaaaatggaggaaaaagttatggcgatggaatcccaagcggaggcactcggccaattagcaactgacgatctagaaggaaagtttgcactgctcgagaattcatctgtcgatgatgatctttcacagctgaaaaaagaactctcgggaagctctttgaaaggggagctcccatcaggcagaagagcggccagcaactcaggcgccgggcgccctttccccgacctagagattgagagcgagctaaacgagctgcggaggaaggccaaagaatactagagagtagagactctccaccaaccatccttcccgggcctgacagaatctctcatttccaagtacatatagcacagctgcagatttgctccatcgcgccttggaaagttggaacagaggtgcgcctttgactgtcactgtcaaagggtatatggagtcgccgagtttctcggcattttcccgtcgacggacatttgtacagctagccataaattgttgtaaatcactacgctccctagagcccttttttttgcgtactacgtatatagtcaaagtttgaagtttccgcgtcgtggtttttacccc

SEQ ID NO: 446 - DNA, 985 bp, Zea mays
acccattcactcgcctgcgctccctcgccgccccagttccccaccccctgctcacccacccgtcccctcctgctcgcccatggctcccatcgctgtcggcgacgccctccccgacggccagctcgggtggttcgacgagaacgaccagctgcagcaggtctccgtccacgcgctcgccgccggcaagaaggtcatcctcttcggcgtccccggcgccttcaccccgacctgcagcaaccagcatgtgccaggcttcatcacacaggctgagcagctcaaagccaagggtgtagacgagatcctgcttatcagcgttaacgaccccttcgtcatgaaggcgtgggcgaagacctaccccgagaacaagcacgtgaagttcctcgccgacggatctggagcgtacaccaaggcgctcgacctcgagctcgatctcacggacaaagggctgggcgtgcgctcgaagaggttcgctctcctggccgacgacctcacggtcaccgtcgcaaacatcgaggaaggcgggcagttcacgatctccggcgctgaggagatcctgaaggcgctttagaagctccgtctcctctagaagccgcagcaacgatcggtctatagtttgaactcgcctttgaataacttgtcgttgggcaaggtctagttcggtgttgtgtatggaacggtcgtcactgagtcatgcacgatttggtatccgtgttgtttatgttcaccggtttgaggaactctctgatccgccgtgacacaaagttgatcctgagagaacgaccgagtatttttttttcctgcaatttgctgccgtcgtgcagagtgcagctttgcgcgctcctttagatgctaaaacatgagcggccatggtgggatgcgtggcaacgacgggttatgtgctcgccggccgtgcagcggtttctggtagcagccgtgctcagatgcatgcgatcagtaataaatttggacagcaacgcgtgttagc

SEQ ID NO: 447 - DNA, 865 bp, Zea mays
gagccaaacatgcccgtccgcccagtctcactccaaaccaaagccatcggaggagcagctggacgaccatggcctcgccgctgctcaagtcgcactctcagctcgccgccgccgccgccctgcactccgtgaggagagccgaccgctgccctgcgacaatacacctgggcaagttccatgaccacgggctcaggtccggccgttctaagagatccggttcagcgaaggtgggcgccttcccgtcgctggacgtggtgccgctgatggtgacgatggtggagcacgtggacatgtcgcgggactacgtcgtgaccaagtccatctggcatctcagcgacgcagccctcaagagcgtctataccttctacgccatgttcaccgtctggggagtctgcttcttcgcgtccatgaaggcaagcgatcccttctacgacagcgagacgtacaggagccagggtggcgacgggaccgtgcactggtactacgacaggcaagaggacctggaggcgtctgcgagggaggagctgctgcgggaggagctgctcgaggagattgagcagagggttgggggcctcagggagctggaggaagcgagcaaggaggagcagctcacaaagtgatcacgcgggcgaatgggctactcatcagctctctatctgagcttcgttagcaaataagttcagacttctctttactgccatgctcaagtctgtatatggccaaaacccaaaacgattgatcaactgcgctactgcagtgcaatagcaggatacgtatagttttcttttcaagggaaacaggaggggagtgcagtgcacccccgcccatactgcatgttattaataaaagaaagttatttacagaa

SEQ ID NO: 448 - DNA, 4170 bp, Zea mays
ccaactcaccatcagccacacgaaattccattgaacaatcccagccataaaaaagagctagacaaaaatcgaagatttttcacctctcctcagtccacctcatcttgtttaagcccaagcaaaacctcgccatagtgcggacggagagcccaggaactgaaagcctaatcgcaatcccactcgcagcaacgacctacgccgcccctaactccaatccagaaccccagagtccagaggcagaccggcaagctggacacctgcggcatggagcgggtggcgctgctccgcacctcaggccgccgcctcctacaccgctgccgcaggggcaggcccgtcgtcgtgcccgctgccgcggcctcatccttggcacgccgggcgtcctcgttctcactcccggcgcgcggctactcggctctgccccgcggcggcgcgcgattcctggtcgctgcggcgccgctgcactgctccggccggtactggccggccgctgcgccccagctcgcgcggaggctgtccgcctccgctgtatctacctcgccctctcccgtgccctatgatacagatgacgtacatgagtatgccacaaagctcggatttgaaaaggtctctgaacagactatagatgagtgcaaatcaattgctgttctttacaagcacaagaagacgggtgctgaagtaatgtctgtgtcaaatgatgatgagaataaagtttttggcattgttttccgtacccctccgaaaaattcaactggcataccccacatccttgaacatagtgttctctgcggatcaagaaaatatcctttaaaagaaccgtttgtggagctcctaaagggtagtttgcatacattcctgaatgcgttcacatatcccgatcggacatgttatccggttgcatcaacaaacactaaggatttctacaacttggtagatgtatatcttgatgccgtctttttccctaaatgtgttgacgacttccaaacatttcaacaagaaggttggcactatgagcttgacaaccctgaagaagagataacatacaaaggtgtcgtcttcaatgagatgaaaggagtttactctcaacctgataacataatgggacgtgtatcccaacagttggtacaagtacaaggattaacttttcagaacattctgcaggcactttcccctgataacacatatggtgttgatagtggtggggacccaaatgaaatcccaaaacttacttttgaagaattcaaggagttccatagtaagtattatcatccaagcaatgctaggatctggttctatggtgatgatgacccaaaagagcggctgcgcattctaagtgaataccttgaccagtttgaagccaaccctgctcctaatgaatcgaaggtttggccacagaggctattcaaggaacctgtgagggtcatagagaagtaccctgctggtcaagaaggtgatttgacaaagaaatatatggtgtgcatcaattggcttttgtcagaagagccattagatgtagaaactgagcttgcacttggtttcctggatcatctattgctggggactccagcttcaccacttagaaggattcttcttgaaagtggtttaggagaagctattgtgggaggtggtgttgaggatgagctccttcaaccacaatttagcataggcctgaaaggtgtatcagaggataatattgaaaaagttgaagagttggttatgcaaactttgaataatttagcagaggaaggatttgcaacagaagcggtggaggcttccatgaacacgatcgaatttagtcttagggagaacaacacagggtcattccctcgtggcttgtcactgatgcttcgttcaattgggaaatggatatatgatatggacccttttgagcctctgaaatatgaacaaccactgcaacaattgaaagcacgaattgcagaggagggatcaaaagctgtgttctcaccgctcattgaaaaatttattttgaagaattcacatcgtgtcacagttgaaatgcagcctgatccagagaaagcatcacgtgatgaagcagctgagaaagagatcctaaaacaagtcaaagctagcatgactcaggaggatcttgcagagttggcacgttctacaaaggagctaaaggaaaaacaagaaacaccagatcctccagaagctctcaaggctgtccctagtctgtcattgcaagatatcccaaaaaagcctattcatgtaccggttgaggttggagagataaacggtgtcaaggttttgcaacatgatctcttcaccaatgatgtcatctactctgaggttgtatttgatatgggttcgatgaaaaaagaacatttgcaattgttgccattgttctgccaatccttactggagatgggcacaaaagatatggactttgtgcaacttaatcaattaattggtagaaaaactggaggcatatcagtatacccattcacatcatcagttaggggaaaagaagatcctctcactcgcataatcgttcggggaaaggcaatggcgccacgagtagaagatttgtttaatctgatgtacatcattcttcaagatgttcaattcacagaacagcagagattcaagcagtttgtttctcagagtaaagcaagaatggagaatcgattgaggggcagtggccatggcatagcggcagctagaatggatgctaagttaaatgcagctggatggatttcggaacaaatgggtggtgttagttatcttgagtatctgcgggacctggaaactaagattgatcaagattgggacagcatatcatcttcactcgaggaaatgagaaaatcactcttttccaagaatggttgcttgatcaaccttactagtgacgggaaaaatcttgaaaaatcaaggcaacatattgccaaatttcttgattcactcccaagtagcccatccattggaagtgatccatggctttctcgtctaccttctgtgaatgaagccattgttgtcccaactcaggttaattatgttggaaaagctggaaacctttaccaaagtggataccagctcaatggaagcgcctatgtcatctcaaagcacataagcaatacatggttatgggatcgtgttcgagttagcggtggtgcatatggaggattttgtgattttgacacccattcaggagtgttctcatatttatcatatcgtgatccaaacttactgaaaacactagaggtctatgatgagacagcaagattcctcagagagctagaattggatgatgatgcactcacaaaagctattattggaaccataggcgatgttgacgcctaccagctaccagatgctaaaggttacagcagcctaatgagatatttgctgggcatcacggatgaggaacgccaacaaagacgtgaagagatactagcaacaagcccgaaggatttcaaggagttcgctgatgctgttgaaaccatcaaggacaatggggtcgtggttgccgttgcctcgatagatgatgttgaagctgcgaataaggaaaacccgctattccctgaagtaaagaagtgtctgtgaggtccaccaccacttgataaggattctagtcgggaggtgtttttttaccagtgaatgcggagtgtgacaatatacgtaacatattgcaagagcaccatctctccgaccacggttatagctagccgaatcttggcttctcttccatgcgattttaaatttggcagtcaataattagttcagatgtagacatagatgcatgctggtagatggctagcgtcttcccatgttggctcaaacgtcggatgtacacaatgattcataaaaaatagaaacggatggtgagatttctacaatatgttcagggtttccatatcgaatacaccctgtgcgaggatagcaaactgtagataaaacactctcggtgaacgtgtggggaggccacgctggttcagcacgctacgtctacgaccggcgaccctcattgtgttgtgcacgctctgagaaggggcgtctacgtcttcagcgggaacgtgggcggaccatcctttgcatcgcattgcgattgcgagtctgactgtctgagttctgatcatccttcgcatcacgtgtctgaattctgaacatcctttacatcgcgttgagattgtatgcaagattgctattggtgca

SEQ ID NO: 449 - DNA, 1351 bp, Zea mays
gggctttcttcttggtctcgttccttggctggacaaaacacctgtggcagcggccgcgctgcttgcctcgccttgctctcggttcgtggggcatggcggcttcgccggcttgtgctccggggctcatctccggccccaccctccctcccctgcccgttgccttccgctgctactgggcccaaaagccctcctccgcgtcgacctcctccaggcgcccgtgccgcaggcggttcgttcccgttgcagctgcctccacccgcacctcctctgcggctgctcggggcctcgacgccgacgacttccgccacccgctggacaagcagaacactctgctgctgagagcaattcccgggctcaacgacgtgggcaaagctttgctaggacccgtctcggagcaagttatggtactccagaacattggaacatcagttctcgtctccccgaaccagcttccagatctccaccaactgctggttgaggctgcgaagctcttgaacaccgaagctcctgacttgtacataaggcagaatcctgttccaaatgcctacaccttagcaatcaacggcaaaaaaccattcattgtcgttcacacaagccttgtggagctgcttactccaagggaattgcaggctgttttggctcatgagctgggtcacctcaagtgcgatcatggtgtttggctcacttttgccaatatactcacaatgggagcatacactgtccctggttttggcatggttgctggcttcctggaagagcagctatacagatggctacgagctgcagagctgacttgtgacagggcagctcttcttgtggtgcaagatccgaaggtagtcatctctgttctgatgaaattggccggaggatgcccatctcttgccgacaagctaaatgtggatgccttcctggagcaagctcgttcgtacgacaaggctgcatcgaacccagttgggtggtacatccggaatgcacaaaccagagagctttcacaccctttgcctgtgatgcgagccagagagatcgatgagtggtcaagaagccaggagtacaagaccgtaatgcaaaaaatgtttcagatggggctgaacagagtatagttagtggcgacacatacgaagaggactgtagagtctgtagcttgtgtatggaagggaatgtctgtatatggagaaggctggtgtttctggaaaaaaaacagatacaaacatagacatattgtatatatttgcagttgaatttagtctccttgtatatgatatatttttttcttttttgttactgtgtaatactgtaactagaatgaataaaagtttgtttgagtttgccggataactggaaagatcggcat

SEQ ID NO: 450 - DNA, 1493 bp, Zea mays
acaccacaattctcagaaaaaatccctcccgctcccaccaccgccgcagccctctcctcctccgcctccgcatcacattccacttccattcccgcggcccgcgccgccatcatggccaccgcctccctcctcgaggccactcgcctcctttccaccccgcgcccgccccgccgcagcctccacacccacctcctcaggaccccgcgcctctccgctctccgcgctcacctccaccgttccgcaactctcgacgcgcaggagccgacggcgaggcctggcgcgctcctggtcctcgacgcgctcaggaggtccgtggtcgactccctcgcggcgctcaagcggcccgcgctcgcgctcctgctggccggcgcgctgctcgccgcggcgtcaatgggcgggccgcacgccgcggcgctggccgcttcgggcgggcgcgtcggcgggtccgccttctcctcccgctcctcctcacctccgtcctacggctacagcgcgccggcgcccaggggcgggtacacggccgcgccctactactcgccttcgcccttcgtgtccttcggcccggccgtcggcatcggcttcgggggatcgggtttcctcgtgaccctcattggcttcgcggcattcctctatctcgccgggttcctgtccgactcgtcaggcggtaccagtgtgcttacagagacggataagaccaccgtcctcaagctacaggttggcttgctgggcatggcacgatcatttcagaaggagcttgaccaaatagctgagaaagcagatacatctactccggctggcttgagctatgtgttgacagagacaacattagcattacttcggcatccggattgttgtatctcagcttactcttcggtggatgtgaaacgtagcgtggatgatggtgagaaacgtttcaatcagctttcaattgaggagaggggcaagtttgatgaagagacacttgtcaacgtgaacagcatcaagaggaataaaggaggcagccaaagatcaagtggttttagcaacgagtacattgtgataaccatattggttgctgctgagggagtacataagctgccggttataaatagcagcaatgacttaaagacagctctacaaaagatgggtgccataccatcaagcaaaatactggcagtcgaggtcctgtggactccgcaaaatgagaatgacacattgtccgagcgagagctccttgaagattacccgctcttaaggcctctgtagaaagaacacgccgtagattcagttttggcggttttcttattagttatagcacagatcctgcgtttgtataataagtgtataataatttgtaattggcgtctctgatagccttcatttcagaacatggaacgtgcaaatctgcaattgtctgtcagtagtcttgttcaatcttcctgacacaataacacaaaattgtaaatagattgttcagagaaaaaataaaacaggacatgctgcatttgtgcgtg

SEQ ID NO: 451 - DNA, 2116 bp, Zea mays
aagtccacgagcgccaagcggataataaagcgtcccccacctccacctcctcctccaacgacaacctccacctcgccttcaactcctccacgctcccgtcctctccacctctcgctcccacctcccccgccgtcaccaccaccaccacagcctctcccccgcaacgcgttccttcccggtgcatgaaaccctaaacctataccccactcccctccccgagccatcctctccccccgcggcgatggccaaggcgctgctctactcctccctcctccccgggctgccccgcgctgtcgggagcagccggagcgctgccgcgaggctgctgctgctcccgcctctccggctgcggcgcggccggcgcgccgcctccgcgtgcgcggtgagggcgggcctgcacgggctcgactccgtcggcgggccccacctccaggccgcgctggagcgcgccgaggcggcgctctacacgctcgccgacgcagcggtagccgcggcggacgccgccgcgggcgcgggggacgacgccggccaagctgcggcggcggtccagaagaacggcggctggttcggcttcatctccgaggccctcgaggtcgttctcaaggtgctcaaggatggtctctcagcagttcatgtgccgtactcctacggatttgccatcattcttcttactatcattgttaaggctgcgacattgcctttaaccaaaaagcaggtggaatcaactatggcaatgcagaatttacagccgcagcttaaagcaatccagcagagatatgcgggcaaccaggaaaggatacagctagagactgctcggttatacaggcaagctggtgtcaaccctttagcaggatgttttccaacattggcaacaatacctgtatggattggtctttaccaggcactttcaaatgtagcaaatgaggggctattgacagaaggatttttctggattccatcactgggtggtcctacaacaattgcagctcggcaaagtggtgctgggatttcgtggctcttcccatttgtggatggccatcctccgctaggctggtatgacacgatatgctaccttgtattgcctgtgctacttgttgcttctcaatatgtctctatggagatcatgaagccacctcagatctatggtctggcacagagtgatgacccgtcacagaagaacacactcctcgttttgaaatttcttccatttatgattggctatttctctttgtcagtgccatcaggattgtctatttattggttcacaaacaatgtcctcagcacagcacagcaggtttggttgcggaaaatgggaggagccaagcctgtagtgagtgagggggataggaggataattacagcaggacgagcaaaacgctctaatgctcaaccagctggagaaaggtttaggcagctaaaagaagaggagagcatgagaaaagtcaacaaagcactcgctgcaggagactcaaatgcatcgtcatcaacgtatgacatggaggatgaagagtcggatgacgagaccacagaagagggagggcccgtggaggaagcatccagtactggcagtgacaagaagcctccaagttactcagggaagaagggcaaaagatccaagaggaagcgcatggtgcagtgatcgtcacagctcaatcggatgcgattttcgccacaactggttgattcagttgaccagttaggtgccgcagtggatcacggagacagttttggcggtctgctggagccctatatttggggtgcagacaaaatgaacagcttccggggtcacaggtatttgctgctaagcttatgcaaatggaggtagctgagtatatatgctaggcctgagggtgagtgatggaccggagaacaggagtcgggtacgcgtgcaagcagagagacagggtctgtagaagtagataaggtgtaatctctcgtcaagctgggttccagaatctggattgtcctcaccattcgtatgcattgcattgtatttgctttcctcttgtaacctaatgaaccactgttttggagggtatgatcgcgcaagctgacaaccatccagtcgtatacaaatgagttcgaattcgtcttgtcagaactcgttaagagaatg

SEQ ID NO: 452 - DNA, 1277 bp, Zea mays
ggaggctcggatttggtttctggtctcagttgcgttgtgggtgatccactcgttcttccctccacgcgccaaaaccccagccacggccatctcctcctccactcctcccgttcgtccacatccaaaagcttcccaggagaaaaaaagaacagttatttgcagcgggaaccctaacaaatcactcgctacaagcgagcgagggagagatgtctctccagtacgtggcgcccccggtccgagcactcgccgtgctaccggcgccaggcccccctcgccgccggacaagccatgtgtccctataccttccgagccggcggccagggctcgccgtcgccccggtccgtgcggcggagtcgtcctctccgcccaccgtgcccgcctccgcggccggcaaggctgtcgtcccggacgacgagttctccctcgccaaggtctctttcggtgtgatcgggctggggcttgggctctcgctcctgtcgtacggattcggatcgtatttcaacctgcttcctggttcggaatggtcagctttgctgctaacctacgggtttcctctcacaatcatcggcatggccttaaagtatgcagaactgaaaccagtaccctgcataacctacgctgatgcctttgctctaagagaaaagtgtgctacccctattctgaagcaggtcaggagtgatgttacacgttttagatatggtgatgaacaacacttggatgaagcactgcagagaatctttcaatatggtttgggtgggggcattcctagacgtaatgcacctatattacaaaagattcgagaggaagtaactgacgatgggaaatacagtttagtactcgtatttgaagccaaagcattggagctatctgattttgagaagagacaggctaaattcacctccttttttggtcctgggattaaagcagaaatcgatgcaggaaaaggtggcggtgatctatatgaagttcgtctaatctcagacactgtttagaaacaatctttgtgaattttctctaatacaaaactaaacttttattttttttctttgatccgctgattttgcatatatgatgttaatagcatcagattttacccttgtttctgttgtgccttctgagcttccatgtatattggctgttgatccttggccatgacctgacaccttcatacactccatggacatgtgtgaaggaaaagttgttgtaatattagatgtaaatgaactttgattgggaacgctgtccatatagttgaaaggtatttagctgtttttttc

SEQ ID NO: 453 - DNA, 1239 bp, Zea mays
atggccaccgtcatggccgcggccgtctcgtccttcccgtcctcctcggccgtcgtcgccaaggcgtcgccggcgtccccctgtgccgccccgcacttccgcccgagggccgtgcgggccgctatccgggcgcaggcgtccgccgtcgaggcgcccgccacggccaaggcgaagaaggagtccaagaagcaggaggagggcgtcgtcaccaacctatacaagcccaaggagccgtacgtcggcaggtgcctcctcaacaccaagatcaccggcgacgacgcgccgggggagacgtggcacatggtcttcagcaccgaaggcaagatcccgtacagagaaggccagtccatcggcgtcatcgccgatggcgtcgacaagaacggcaagccgcacaaggtcaggctctactccatcgccagcagcgcgatcggcgacttcggcgactccaagacagtctcgctgtgtgtcaagaggctcatctacaccaacgatgccggagagatcgtcaaaggagtctgctccaacttcttatgtgatcttcagccaggtgataacgtccagataacaggaccagtcggcaaagaaatgctgatgcccaaagacccaaacgctaccattataatgcttgccaccggtacaggtatcgctccgttccgatcgttcctgtggaagatgttctttgagaagcatgacgactacaagttcaacggtctgggctggctcttcctgggtgttccaacgagcagctcgttgctctacaaggaggagttcgggaagatgaaggagagagcgccggagaacttccgggtcgactacgccgtcagccgggagcagacgaacgcggcgggggagaggatgtacatccagacccgtatggcggagtacaaagaggagctgtgggagctcctgaagaaggacaacacctacgtctacatgtgtgggttgaaaggcatggagaagggtatcgatgacattatggtgtcactggctgaaaaagacggaatcgactggttcgactacaagaagcagctgaagaggggagatcaatggaatgtggaggtctactaaccgctgaattttgcagctgacattttgtgttgtgcctatctgtaagtgaggccagggtgtactgcgtatataatgtagatagtgagtgtgttctgagtttttttttactattgccgtctctgtttatagatttgtataagtactcttaatgttatgcctattcgatttttt

SEQ ID NO: 454 - DNA, 2435 bp, Zea mays
gccacaccacacgccgattctctgaacaccaatctgcgcaatcccggcaaaatcccaaaccctgcctcgtcgtcgcaccgcctccactcgtcccggatcaaccacctcctcggtccgcaaccacaaccacacccgccctcccgctcgccgcagccagaaccagctccaacccaaccagaaccagctcgccccggccgccgcgaccgtcccccctcatcgactcgaggcaacgaagcggccggatgggagcagcagcctgaccctgacgcgatgagcccgcccgccatgctgctgcccgtctgctccgccgcgcccagctgctcccccctctgcccggtgacggcctcgcacgtcgtcgcgcgggtggcgcggagggtggacgtcggcgccgcgctcaggtcctacgccgactcgctcgtcgcgcaggtgcccgaccgcccgccgctcgccgactcctccatactctccccctacatcgccgcgccggacgacatcgcgcgagccttcggcgcccccgcctccgagctcccgccgctccccagcgccgaccccagccctgggctatgttgcacgggcaccgaccagccgctggcggcagtcgcggacctggccgcaactgccgtggtcaactcggctcccaccgacgccgcggagcgggccctgtcggacgcgccgttccccagcacgttcccgtctgacgcgtccgaggtcgaggactccgtggccaggctcatcgataaggtcggcaagcaggtcttccaggcggaggacgcgctcaccgaggcctacgacaagctgaggctgtccgcgtacgacgcgctcggtgcgtggaggaagacggtgcgcgacgcgataggtgggctcaaggcgtcggtcgacgccggtaagcaacaggccgccggaggggtcacggatgcttccggcgcgttgcacgagaaggtggccggagctgggactgtggctgttgatgttctcaggaaggcgattgttgcagcagaggattcactgggcagtgctgccacattcgttgtgtattcttatgggtcggcgaaggagtctctaccaccaaatgttagagatctgttgagctcgtctgaggagaaagctagtctagtcttgagaccaatcggaaatgctctgcaacaggtctatgtagttgttgaaggtgttgagaagaatgttggtttggatccaagtgatcctattgttcaattggcagttgtgcttggaggttcagtgacaatagggacaacgtactggctcttcacatacagtggctattctggagacttgtcacctgaatcagcgtttgacttattgaaaaacgatgacaaagccgtactcattgatgttcggcctgaggatttgagggaaaaagatggtgttcctgatctacgcctcggggctaggtctaaatatgcaagtgtagcttcgcctgagatcaaagatccagtaaagagtatgctcaaagatgaaagagagtttgatgatgctttactggcagttgtcatccgaaacttgaaattggtgaagggcgattcaaaagtcatagttatggattctaatggagctcgatcaaaagccattgctaggttactgaagaagctcggtgtgcagcgaccttaccttgttaaaggtggtttccaagcatggtcaaagaaccttcgtgtcaaagaactgaaacctgagactgcattaacgtcaataaatgaggatgttgaggaaatcctagaacaaataaagcccaccccaactcttgtgtttggatctcttctgggcctctcagcactttcctatgctttactggaatgggagatgactttgcaatacatagctgttttaagcgttgggctgactatctacttgcgattctctacatatgaggactccgaggatttggagaaagacctaaagctgttgctgtctccagtaagagtaggcgcagacgccttgtcatgggcagctaagaagatagagccaaacaaggtgggcctgccaacgtctccttccacgacggcggtgaaagaccgggttcttcaggccgcggcgaagcacgagtcgcagccatcggatgccgacgagtcgtcggtccaaacagccgaggcatgacacgcgccgaaagcttgggagccagtcgagcggtcccgccgaatcctcaataagagcactcggtgggcgctccctggtaatttgtgaagtccatgtcgtttatgatgtaaagcactgtaaagcggttgtaaattaattgcgtgagcagcatctgtaagttgacatcaacttggttggttgtgtgtgtgtagattatagagaaagaggtgtcaatgtaacgttaattcctgagcctgtctgcgatcttgcccgtctggtactgctactctgcttgcttgcttgtttggcacgcgatcaaggtgaattaagtaaaaatggtccgtggt

SEQ ID NO: 455 - DNA, 975 bp, Zea mays
agagctgcccgggtacttactggcgtgcggccgagccgagcgggagtagcgcgtcaggcaatggctccggcaccggtggccgctcccgtggcttcggtctcccgcgcggcagctgcgctcgcccccgccggcgccgtccgctccgccagggtagcctccctgcaccctttccactcttccaccaaaatcgtgctgctgccaccacggaccggcctgctcagatccgccaggcagaggcggcgcttggcggcacggagcagcacctcggagagcagcacggatgactcccaatccccgaaacaagagaaggcgccgttcgggtacacgaggaaagacgtgctgctgatcggcctcggcgtcaccgccttcggcgtcggcctcaagtacgggctcgagctcctgggagttgaccccttgcaggccggcaacgtcgtgcagctgctggtggtgctcgggatgacggtggggtggatctccacctacatgttccgggtggccaacaaggacatgacctacgcgcaccagctcagggactacgagaagcaagtcatggagaaacggctggagagcttgtcggaggctgagctgcaagctctgctcgagcaagtggaggaggagaagcagcgcgtgcctcaggtcccggaagagcctaacgctattaccttcaggaagaaatgatgatcgttctattatctgccaaatggacaccgacctagcttgtttatagcatagcttcgccttcaatagctagctccatcgatattttaagatctgtacaatacgccccgctaagccactagtgctgtcaaacatgaaattatccattttctgccgcgcgccgttatgggacaataccgtagcaccaagaaccaaatccgttctttgagatatcattgtcgttgtaactatatcatccgcaaagctacagtttgggaggtcttcagcattgcctgtttgatcttccattggttcgtt

SEQ ID NO: 456 - DNA, 2475 bp, Zea mays
gctccagcggcatccgccacttcgtcgtcgtcgtcgcacggattggcattggctgccccccggccctgttcctcgtcctcctcatcaattcccgtctctcagtcctcccaataatggtggcgtggtgagaaatccttccgtccggccgtcgtcttagaagatgaactgttcctcttgctgcgccgctgccactccatcttctccggcgcttctcgccaggccgcgggggggtttagctgctagctgctccacgacgacagcaaatcagaaggtgcttttcctgggctcaaaacagtttccacggatcacgtatagccgtgcgtcgtcacggttgtcgcggagagaggtaatagcttttgccgggcaacaaccttgggacatcggcagatttgtcaagacgctgtatttcttcaacgggcctccaaaccttctcaagattgtagaatctatcatcagcagtttcactggacctgcttctagtgaagtgccaaagaaaatggaaacgtcggatgtggtgctggttactggagccaccggtggtgttgggcgacgggtggtggacgtcctgcagaagaagggagtacctgttcgagtattggctagaaatgtagacaaggcaaggagcatgttggggccggatgtacctctgatcataggagatgttacgaaggaagatacacttgatcctaagctattcaaagggataaaaaaagtagtcaatgcagtctctgtcatagtggggccaaaggaaggtgatacgccagacaggcagaagtacaaacaaggcatcaaatttttcgaacctgagatcaagggaccttcacctgaaatggttgagtacatcggaatgcaaaacttgattaatgccataaagagtagtgttggactgagtgaagggaaactgctatttggtttcaaaggcaacttatctggagagattgtgtggggagctcttgatgacgttgtgatgggtggtgttagtgaaagtacattccaaatcttgccaacaggaagtgaaagtagtggaccaactgggttgttcaaagggactgtatctacttcaaataatggtgggtttactagtataaggacaaagaattttactgtgccagaggacctgtcagcatatgatggtattgagttacgagttaatggtgatgggcgacggtataaactcattatacggactagctatgaatgggatactgttggctatacagcaagttttaacacaactaaggggggatggcaaagtgttaaagtacctttctcttctctgaaacctgtattccgtgctcgtactgtgactgatgctccacccttcgatgcaagcaacattacttcactacaagtatcatttcttcctttctttccccttcatcagtaaacgtttgaagaattggtaaactctcatctaaaagttgatgtgacgatttttgtagctcatgtttagcaaatttgaatacgatggaatactcaacccaacatttactgaaggtccgtttgagcttcctttttcgagtattagagcatacatcaatgagccgatcactccaaggttcgttcatgtgagttctgcgggagttacaagacctgaaagaccggggttagatttaagcaagcagccacctgctgttcgattgaacaaagagcttggctccattttaacttttaagttgaaggcatgctcattctattagacacatctttatattaaaaaaaactatcttaaactcggtcttttaattcttctgacataacaaatcacaattgtacattttttgtactgcaaataaaccatcgatatgcatctaagtactttaagatatagactgaacaatggtgctcctcattttgtcatgttggttatcttggaaccattatataatgtctgaggtggcctttcagggagaggatttaattcgggaaagcggtattccgtacactattgtaaggccatgtgcattaactgaggaaccagctggagccgatctcatgtttgaccagggggacaacatcacaggaaagatatcaagggaagaagttgcccgtatttgtgtagcagctctggcaagcccagatgctgtgggcaaaactttcgaggtcaagagcactgttccattcagcgaaccgtatgtgattgaccctgcaaatcctcctcctgaaaaggactatgaagtatatttcaaagaactcaaagaaggcatcacggttctcgcggaggaagatggcgaatacttggaaggagcagctgatggcatttctattgacatggtggctgaatctcccactgtttgtcccatgaaggttgtgattgctggctcactagatggtgtgctggtggacaaattgcctgctgcgttttctgtggttggaggggtatctgatgatggtgtgtgcggtggtggatctccttttgaggccttgttgatggctgatactggggccacaatggtggctgctgatctggtgtag

SEQ ID NO: 457 - DNA, 1834 bp, Zea mays
gcacccaaacgtttcgatatcccagagtggtgtggccgccgccggcggcttctttctccccttccattccgctccccgtgacgtcaccgaccaggcaagcactccgctccaccagagccgcctcgcctgtctgtccgacccacacacctaccggagcgcgcgtcccgaggtcggcggagcagggtcgggaggagggtatggcggtggtgggcgtcctcgcgctgcagggatcctacaacgagcacatggccgcgctgaggaggatcggggtgaagggggtggaggtgcgcaagccagagcagctcctcggcatcgactcgctcatcatccccggtggcgagagcaccaccatggccaagctcgccaactaccacaatctgttccctgcacttcgagagttcgtcggaggtggaaagcctgtctggggaacctgtgctgggctcatctttcttgcaaacaaagcagtaggtgagtggcttcaaagctttgagacagagctttccgtgccaaagctttcggagaaggaaggagggaatgatacatgccgcggtgtatttatacgggcacctgctatattggaagtaggtccagatgttgaaatattggcggattgccctgttcctgttgacagacccagcattacaatatcatttggggagggtactgaggtttgtatgttgctttttttttactagaatactgcaattgtcttcaaatggccaaactgagttctgatatatttctagtaaactagatttttagcatgagcgctcattatttcttctcgttttaacagttccttttagttctttaatgagcagtgagccagtgaatatggccatttcttggaaagcaggtacaagatactatggtcagatctgggcatacttgcatataacatgctgattctacatgtggtctctgccttcttgtgtagtcctgattattcaaactggctttgagatctgaaatgatatatagttttaacccgttggccattgcaactcaaatattcagacaaatggactaatgggttcttcgatgattcgatcaaatttgtctcctttggggtattactggtttgctaaagcatctgaatgggctgccctgtcacggcagcatgacatgtgtttttgttcattggcttgtttttctgcatgaaatgtgttcatgtaaccgtgccttttgggaattggccaagtttttccttatattaggaaaaaaacagcgaaagtgctagttggcaatcttgtaacgcttaattccgtattctgaatggggcctgcttatcctctgttgactgacgagaatatatactttcaggaagaagagtattcaaaagatcgggtaattgttgcagtgcggcaagggaacatcctcgcaactgctttccacccagaattgacatcagactccagatggcatcgtttcttcttggacatggataaagaatccccagcaaaggcgttttctgcgctctccctgtcgtcatcgtcaagagacactgaaggcctgccaaagaataagccgtttgatctgcccatttttgagtaacgctaaagacaagacaaaccaaaagattgaaggaacgaagaaactgaccgtatttattatcgatcatcatttagccggttacaaaaacagccagctgagaatctgtcatactcagccgaaaaaagtgttgtctggtagctaacttgtacggataaaaaataatcacgctgtgtgctgtacgcaattctcatcagataaagcgaaacattgttttcctgggaattatagttttgctgaaggtgaccagttgaacacttgaacatggtaatactttccccct

SEQ ID NO: 458 - DNA, 1340 bp, Zea mays
tcactaggctacgaaacagtgccgcggtgcgcgcacacacagccaccacagcccagacccctcgcctcggcctcttttaaatatcgcgcatcccggcgccgcaaatggctcacgcggcgctgctccattgctcccagtcctccaggagcctcgcagcctgccgccgcggcagccactaccgcgccccttcgcacgtcccgcgccactcccgccgtctccgacgcgccgtcgtcagcctgcgtccgatggcctcgtcgacggctcaggcccccgcgacggcgccgccgggtctgaaggagggcatcgcggggctgtacgacgagtcgtcggggctgtgggagaacatctggggcgaccacatgcaccacggcttctacgactcgagcgaggccgcctccatggccgatcaccgccgcgcccagatccgcatgatcgaggaggcgctcgccttcgccggtgtcccagcctcagatgatccagagaagacaccaaaaacaatagtcgatgtcggatgtggcattggtggtagctcaaggtacttggcgaagaaatacggagcgcagtgcactgggatcacgttgagccctgttcaagccgagagaggaaatgctctcgctgcagcgcaggggttgtcggatcaggttactctgcaagttgctgatgctctggagcaaccgtttcctgacgggcagttcgatctggtgtggtccatggagagtggcgagcacatgccggacaagagaaagtttgttagtgagctagcacgcgtggcggctcctggagggacaataatcatcgtgacatggtgccataggaacctggatccatccgaaacctcgctaaagcccgatgaactgagcctcctgaggaggatatgcgacgcgtactacctcccggactggtgctcaccttcagactatgtgaacattgccaagtcactgtctctcgaggatatcaagacagctgactggtcggagaacgtggccccgttttggcccgccgtgataaaatcagcgctaacatggaagggcttcacctctctgctgacgaccggatggaagacgatcagaggcgcgatggtgatgccgctaatgatccagggctacaagaaggggctcatcaaattcaccatcatcacctgtcgcaagcctggagccgcgtaggaggaggccaaggagcacaagttactagcacaggcacaggagtgccaagtgcaataatgtagatccgtggcaccatcgccgtctactcatctatactgcaccaaaatcaacattctcctaggacatgttaaataattttctgccactcgtcgagatatttcaaattcactgttccac

SEQ ID NO: 459 - DNA, 1257 bp, Zea mays
cgcagcgtccaatccccgcgcgtcttcacgccgcgccacgccgtccgggccatgggccaccaatggcgacccccaccgccaccgcactcacctgctcctgccgcccttcgtcgccctcctcatcatccgccgccttccgccggctgaacatcttcgcccccgtctcgggcgcccattctcctcctcgacgccgcctccgtctcgcgccattgcacgtcgtcgacgactccaagaacccccccgaggagaggtctgagacggataagatggtggacggcatggacttcggggagctctgcagcgacttcgagtgcataagcagcccctacgtggagtcgacggcgaggcaggtcgcgcgggacatcctggagctccgcgaggacaaccgcgcattcaactgctacgccgtctccgtcaagtacaaggacccactcaggacatttgttgggcgtgagaagtacaggaggccgttgtggatcaccaaggcgttggaaaaccctgtagtgataatgatcctgcagaaaagaaacccaaacttaattgctgcacaagcacaacatcgatcatcatctaatcaaagactcttgttatcgcgtcagacagtccaggaaatgtcaatgcagtcgacgagcaacctgaccatcagatgggcgttgagagggaagcctaagaacccgttgttcgcgagcgtcggaggagacgtcatcgtccgcgtcgagtcacggttcgtcctgaaccagataagcgggcaggtgctggagcaggccgagtcctgggacctctccgcctcgtccctccctgcccaggcctacttctggctgtcccgaagggtctactccgccgtggagtccgggaaggacgcgatcgaagccgccaagagcgcggcgtcgtctgggctgacgaccaagggagaccagaatctcgaggcctatccggatccttctgctgatcctacaaagttctttcagaggccggatgatgggttcagccaagacgtgtaccagatcggccttctcctggccgtgatctacttcattgtacagtttctgaaggcgaccctgtgaccggctgcagcctgtcgaagaatgtagcctgtgtgcagtatacatgtatgtaactatgcctagcaacattataaaatacgggcatatatcatcctgccatctgacctgcgacagatttgtgacctttcaccactgctgtcggtgatattagtttggcacgcaagttgccaatttacaggtgttaaacttgaca

SEQ ID NO: 460 - DNA, 2062 bp, Zea mays
ggcggcagccactggttggcagcggttgtccttctccggtgtccatggcgccgccgctcgcgacacgcggcctccccctcgcctcccgcggcccgccttcttgcgcggcctcctgctcctcgtgcctgccctcgtatctccagctcggtcgccggccaagccgccggttccgctgctcctcgccacaggtcgatgcagcggcggtgccgccggggaagggcggggagtaccggccctctttcgcggacgacctcctcctcgccttcttccggagcaagatggtgaaggcgagttccactccatccaccgatcccttagttcctccctccagttagatgatgccaaaccgtgttattagtttttttttgaaactttggaaggacccagtttttaataaaattggtttatagaaattgagtccaaatataccgacttaatttatagaaattatattctcagtttcttaaaaaaccgagaaaccgttctttcctagctaaaagataaaaaccggtttcttaaaaactagattgcttttaaacagagccttaaccatgttattagcttcttttccttaaataagagagaaccaaaaaaactttttttgtgtttagtatagagttctagcatggcagataatggaatcttctgaacattaataatccattcatcgctaggttcagttctgcttggtaattttgatcaacagtctgacaaatcctgatgaattgacgccacgtgcataactgaacttgtgctagctattagtttatcgtattactttaatcgagcttggaactttgtatttctacaaaatggccatttagttttgttgaaatctgagctgaatgctctattttttgaagaataatttgttttcagtttatttatttatttatttatttgttgtgtgagcgaggcgaggggtgctttcaatcataaaacaactaagcaggtccgatccaatgtgagattaaatgttatcatagtttccagacagactgcaactccagaaacatagaataatctcactgtcatatttgaatgagaaatgtacacacttgcatacgagctgaaaattttcctggaagtggctacaaaagaaatttcctgtgctttaggacaaggtacaagtacttagaattcagaaagccagccccctgttgacgagtatctgttaagttttaggtcaatatggaatatcacagttttgcataaaagcaagacatgcagtgcaattacattctgttgattctctgaaaggctgtaggaggttggatgggattctgaaaagcctgggtatgctggactaatggaggtagcaaaccgtctcatggtcaagggaaagagtgctttggagactgagcaggctgctgtccgagtactacagtcactgtttccacctctcttgcttgttctttacaaagctcttttagcgccaattgctaatggccaactagccgctatgatgcttgctagggcgacagcaatttcatgtcaatggttgatgggctcatgctcagttaattcagtcactctgcctgatggaaaatcatggtcaagtggggtgttcgttgagaaatgcaagtacctggaagagagcaagtgccttggcatttgcatcaacacatgcaaactgccaactcagactttcttcaaagatcacatgggtgttgatttgtacatggagccaaattttgaagactatagctgccagtttgtgttgttgttaatcgcagttcaacttcggggtgccgcctccacctcttgatactgacaaagccctcaaggaaccgtgcttggacatctgcacaaacgcaaggcggcgtagagagctcggaagaaatagcagcccagatgagctcagttgcccccaagtttgatatgctccctgtaaaagactgcacatcatagattattgcgcgttgggcttgggcatggtgtgccttgcttgcatttgtcagtcttcgtgcaacgatgtcaagtaatttcggtaataccatttctatgttgcagacacacacgttttcgattggatcaacatgactacatgagtaaataactc

SEQ ID NO: 461 - DNA, 5048 bp, Zea mays
agacatcatcacctattcatctggaccgatcctcgtgctgtccgaagtcaaacggtccaaatcgaggcacaccttttcttctccctcccgtcaccgtcgcactgcctctgcctgcgtcgcgatcgcgacatgcccggcgccgccaccctcagatcgcgcgtggccgtcgcggccgccgcgtgccttgcggtcttcgcagcggtggcgctgctccaccgcaagcgccgctggaaccgggcgccctcctcgtctcgtcgcctcggggtcgggggacgcccacgccgcgcttgcgaggaggaggagaagccgcaggaccggttcaagcgcgtcctcgcggacaactcctactccccgttcaaacacccgcgccgcaagagtgctcagttgggaagtgcagaaggcgaggcacccctgccaccgcctcaaggaatttcacgggatccctggtacattttctgtctgaggaattttatcgaacacctgagggcaaaggtgcgccgagtttgactaggaaatcagattcatattctggtacccttgcttggagaatttaagtccagtcgctgctttgtgcattcatgtaaaacgttgttctactgagtgcttctgttagttcatattactctagtgatgcacgtagtgtaataatagcatagtgttacaagctttcagaagagatccaggccatgttcttaaccaaacaatagattattgctggtaccatttggaacagcaatcacttgtcatgttctggttctggaactgtaattctcaagtagctttaatatttgtactgtaactgctgactattttactcgagggagtcaagctgttattatgaattagtaaagaggatgtaggcctggtgcagtgtggagactcgagagaagtctcattgagtcactaggtccgttttagtaaagggatgcagagatcttaaagggaatggttaagtagttgctatcattttactcgaggaagtcaagctggatggttggttgcataaattttgctgtaagacacattttgcatatctagcatatatactattgattgttcataggaccatatcccaaatggtccattcttttaattgttgtgacattccattttaattgatacagaattgtcacaaaaaggtcatccatttgaggaggaaatcacatctttgctaaagaacccccctggttttcatagctttatgctgtgtgaccagtgcccagaaatgagtgctacatataattgggttcatacagaaactcaactggaacatttggcgagattattgggtgaggaaagagcttttgctgttgatacagagcaacatagcattcgatctttcctaggatatactgcactaatgcagatctctacccagaatgaagactatctgatagacacaatagcactgcacgatgtgatgggcattctacgaccagtgtttgccaattcttctatctgtaaggtaacacatctttgtaactgctgccagtggtaagctgtttattttcattttcgatgctgactgcaaattttaagctctattacagtacaagaaaagatagtgtcatgaactccagttacatgccattggaatgtagttgaatttactttgggatatgcattagaggtataaactgtaggacatactgatggcgacatagtatttttcgcttcattgtgtttatatgccactcaattactcagcccagaataaaagataaactgtgggacgtcctaaatgcacacatttttctgttgccttatgctgtagatcttccatggagctgacaatgatattctttggcttcaaagggattttcatatttatgttgtgaatatgtttgatactgctaaggtaagtactggtataatatatccttgttcacacatttaatctactctacaaatctggtaatgtaacatatttaaaatcattcgcttgctagacgtttttttggtgcaacatgctgtgtggcatgcattgcttagattgacatcctattttacaaggaacaattctgtgcaggtagtttagttttttttcattgtaaactatttgtagatcacttcacatgtatgtgtgttgtaattgctctatgaaatgaaagaaacacggttaactgaaaattaatgttattatctatttatctaacaaaaataaaacaaaaagcctaataccatagcacttgaaaatttgtattattaacaaatgaaggaaaaaccccaatactgtacctagttagctaagaatgtcaatctagaaaaatactatctcgctctttaattacttctatcatggtttcttggaaacaggttgttctcgattggactatactactatgtggtattgattgcttcagtattaggttctagattatatgatttgtttagtccaagttcagggaaatgatttggtggtgtggtttctcgtgactccttttttgcccatattttaaaatcgatataatagatttcagtcagataatatattatactttctacaactgagacatggaaatttcaacgtcataactgcaacttgaatagctttgtgaatgaacctttcatgtggtggaatgccgctgcagttaagaatcagaagtttagaacttttatatcattagaacatctttgctcaccttataatcgcatgctgcaatcatgcttagttgtttacaaatattttgttttttgaacaattttatttcttgcccccctcattttttgagaagtttgtgtaacacgtcttcttttcatttctaaattcacatccttagcttgtttttcctatgctatgaatgtatgcaacttttcttaattgcgccttacaactgattttttttccaggcatgtgaaattctattgaaaccacaaaaatcactggcatatttgcttgaagtatattgtgaagtgaccaccgacaagacaatgcagcgtgaagattggagactgcgtcctctgactccagaaatgatcgagtatgcacgcactgatgctcactatctgttatacattgcaaattgtttggcatcagagctccatgcaaaagcctgtgatacttccagtgataaaatcaattttttcttcgaggctagtcatcgctcaaatatggtgtgcatgcaactgtattcaaaagaaattgaatcccctcctggagcttccagtgcaacatctattctctcacgaaatttgcaaactcatgggttcgactccaaaaagtctagtgaagtgaaggctcggatgcatgatgaaagcttacgatatgttctgccagaccaagctatagctgcccttgccgttagtcttccaaagggcccaacagaggtgtttgctgtcatagcagaaactgacctaagcatttcaagtatgtacccttccttgtcatcaccgtcacctcttgttgtggctcatgtcaaagaactctgttatctgctggatgacatcactaccagcatggacagcatctttaaaagtttactagagaagtataaagatccaagtggattatgtcgactatcagtttataattataaccttataacacacctaagtttgaagcaaacaagatttatgctagtgatggaagactactttgctactgtgaccgcaaaaaactggaatggtttgtctcctaaatatatgctcattagctatttacatgcatgtagcatgaatgaagaattattttggcaaactgatgagctcttctatcccaggtacattcagcgtaatttggcgaaattgattgaaaatagtcctccagcaatcatgcttctctttgaacctaaaggtcgtccagaggatgaagataacgagttctatattcagagcaagaaaaatatttgtgtgggctgtggagaaaagagccattatattagatacagaataataccgtcatgctacaggatgcattttccagaacatttaaagagccatcgttcacatgatattgtacttctttgtgtagactgtcatgaaatagctcattcagcagctgagaaatacaagaggcgaatagcagaagaatttggaatacccctttttgtgcaaaagataatgaactcgggtgatataagtttgattaccaacacatcagtatctgaagataaattgaatggaacaggtgtctccccattgcagctgaggactgctgccatggctcttctacgtcatggatccactatgccattgaagagatgtgaagagctaatgcagattgtgaagtcatactatggtggtagagatgtgactcctgaagatctcgagatggcattacttgttggtatgagccctcatgagcgaaggcgtcttgaaaagaaaaagggatattcgtttagagctcaggctcaaactattattagaaagagcagcagcaataccatctcagaagacagtggacatggatcagaaaattgtcatgccttatctgcgcgatttcctgaggttggaactggtagtaatggtcagcaagagtttgatgagacagggaatcaaaaccagctagagaatttaaccctgagccagggaagctcaagtttgccagtcagcatggaggacaccacttctgatcatgacactgtgacactcgagaccgataccgagcagcaagcaagaggtgcctgtactcctggaaacagtcatgacgacaaggaacaatccatatgtgacaattctagtcaggtcatttccaagaatgctgagaagatatccctgttgggtcatgggcatcatgtggacggcgggattttggtgacttcagtgtctacaagccaccaaggaaagatcctcaatctgcaactgcaagggattaggcttacgcgggtgtcatgctgtcgttggtaccctgaggttcaacttactttccagaattggttccattcccttaaacttgatcttgttgtacttgttccattcccttaaacctgatattgttgtacttgtatgtatctcaatctgtgtgtttgttcgagtaccttgaaataccaatttcatctcctatgtatttctttgagatgaactttgcatcagttttgttgagccgtttt

SEQ ID NO: 462 - DNA, 1569 bp, Zea mays
cctcgcggtagcgtgcggctgtgccgtcgacccgtcgtctcctttctcctccactcctcgtcgcaggcggcataacggagcgcacgcacgcacgcaatggccatggccgccccgccacccacggctctctgcgcccgccgcttccggccccaccacttcgcatactcctcccccgccacgctccgcctacccacggcctcctcctcctcacagctccggcgccgccgccggctagccgtctccccgcgcgcggacgcggcgaccgggacgggggatgtggaggcgctcagggccggggtgtccgtgtacaagccgcggtcctacgacgtgctcgtcaccgacgcggctcgctccctcgcctgcgccatcgacgacggcaagacccggctcgagatcgaattcccgcctctgccaagcagcatctcttcttacaagaagcagaccactttaaatcttaaagatacaattgataagactgataggtctaaacttctcaagggctcctcagatgagttcatcgatgccaacatccagcttgctctcgttgttgctaggaagctcaaagagctcaaggggactaggtcttgtatagtgtttcctgatcaacctgaaaaacgtagggcatcagagttgttcaagacagctatagacacgattgagggtgtaaccatcagctccctggatgatgtacccactgaccctgtcaacagcttcttcaaatcaataagaaacaccctggattttgacttctcagatgacaatgaaggtagatggaaatctgatgaaccaccatcgttatatatcttcatcaacagcagcacgcgtgaccttgcttctatagagaagtatgtggaaaagttcgccacatctgttccagcccttctattcaatctcgaactagatacattgcgttctgacctggggcttctcgggttccccccaaaagatctgcactaccggttcctttctcaattcaccccagtattttatatcagacagcgtgactattccaaaacaatcgcagttgctccatacatagtgaattatagtggagctgtattccgccaatacccagccccctggcaggtcatgctgaagcaggctgatggttcctatgcatgtgtcgctgagagcgaagctcggttcactttgggacaggcgaaagaagaactattgagagttattggtttacaagaagaagagggaagctcccttgaatttctcagaagaggatacaaggttcatcccatcctagctaaacaaatgctacctggtgggaagagaacgttgatcaggagacgtcgtctgcctggcgaacttgagatgctatacttgctggatggatgcttttctaacctggaactgggaatggataatttggccaacgagtgtccatgtcttgttgtatggaactaaaaaatctgaaattacagaaagagaagtccatgtacagcgtaataacattgcctgtgatgatcgtattattattattgttgttattattatgcgagtacacagagcttgtgagcactaagaatgtttttttacaatggtgatttgtacatttgt

SEQ ID NO: 463 - DNA, 2334 bp, Zea mays
atggcccaccccaccacgcaggagggaggacgcccgggcccggacaagaggtgtgcttcagctatgcagttcagcagcgtgcttcccctagagggaaaagcgtgtatgagcccagtgaggagaggcagtggaggttatgggagtgagaggatgaggatcaactgctgcagcatcaggcgcaacaaggcactgaggaggatgtgtttcagtgcaaggggtgctgtgagcagcacgcagtgtgtgctcacatcagatgctggcccagacactcttgtcgtccgaacatcctttcggaggaattatgctgatcctaatgaagtcgctgccgtcattttgggtggtggtaccgggactcagcttttccctctcacaagcacaagggccacccctgctgttcctattggaggatgttacaggcttattgatatccccatgagcaactgtttcaacagtggcataaacaagatatttgttatgactcagttcaactcagcttctcttaaccgtcacattcatcgtacctatcttggtggggggatcaacttcactgatggatctgttgaggtgctggctgcaacacaaatgcctggggaggctgctggttggttccagggcacagcagacgccgttagaaaatttatctgggtacttgaggattattacaagcataaagctatagaacacattttgattttgtcaggagatcaactctatcgtatggattacatggagcttgtgcagaaacatgtcgatgacaatgcagacataactttatcatgcgctcctgttggagagaggtatgtcattacatcaggtttctgattttttttcagcacttgtcatcagaaaaccggtgcacatgctgattttttctttgttttggaagtcgagcatctgactatggattagttaagttcgatagttcaggccgtgtaattcagttctctgagaaaccaaagggtgctgccttggaagaaatggttagccatcatcttacctcagggactcagatatatattggaaccttccaagaataacttactttacaaaactagcactatctgaaatgtacgttgttgcttctgcttgttgcagaaagtggataccagcttcctcaatttcgccattgattccccagctgaatatccctatatcgcttcaatgggagtttacgtttttaagagagatgttttgttagaccttctaaagtcacggtatgctgaactgcatgactttggttctgaaattctgcccaaggctttgcatgagcacaatgtacaggtaaaacagtttcctttgtgattcacttccattattcggtaaatcacgggcccagtcagctttgcacgagtccaatctctattagggtagagcagtatcgcaccaaatgcacaggcagttcatgtgacttcgtttgtcaggcatatgttttcactgactactgggaggacattggaacaatcagatctttctttgatgcaaacatggccctctgcgagcagcctccaaagttcgagttttacgatccgaaaacaccattcttcacttcccctcggtacttgccaccaacgaagtcggataagtgcaggattaaagacgcgatcatttcacacggctgcttcttgcgtgagtgtgccatcgagcactctattgttggtgttcgctcacgcctaaactctggatgcgagctcaagaataccatgatgatgggtgcggatttgtatgagaccgaagacgagatctcaaggctactggcagagggcaaggtgcccattggcgtaggggagaacacgaagataagcaactgcatcatcgacatgaatgccagggttggaaggaacgtctccataacaaacaaagagggcgtccaagaagccgaccggccggacgaaggatactacatccggtctgggatcgtggtagtcctgaagaacgcaaccatcaaggacggcaccgtcatatagagactaactttggccttacgcatggcgtgcaaggttacaggttagtcatcgtcttgagagttgagacttagtttgaggcgcgcgcccgaccttgacttgagccgtcggagggacaagaacatgaggaagaagggctggtggtgccggatgttgccatggacgacgagaaatggtttggtgcggtcgcatcggttccagtagctagctcttccgatgttattaatatatgtatctagtggagtagtgcgaacagtgcaataagctgggcgagcaaagccgcggcaactcttggcttggggattgttggtgcatcttgtaaataataaactcggacgcagcaaatgaaacatgcccctcatcttcttccata

SEQ ID NO: 464 - DNA, 1239 bp, Zea mays
aacctgattgcacacgatattttctaggcaaaaacctctcatgctaccttttgtttttcgccttcttccctataaataacggccaaattgcccacaaagaaaccacccacccgcgcgccgtgcctcggttttagggcccttccctcaccgccccgcggccatgaagctggaggtcatgcccaagcccaaacagcgggtgctggaggcgcagcagagggaggaggccatggagatgagcggcctggacctgtggaagcacgagaagccgccaaggatctgccccttgcccccgtcgctcccgccgccgccgccagcgttcgacgaggcggcgctcgtgccgccgctcaacttcgccgtggtcgacgacggcatcttccgctccggattcccagggaccgccaacttccggttcctcaagtccctcaacctccgctccatcgtgtacctgtgcccggagccgtacccggggacgaacacggagttcctagaaaagaatgggatcaggctccaccagttcggaatcgaggggcgcaaggaaccatttgtcaacatacccgacgacaaaataagggaggcgctcaaagttgtcttagacccaagaaaccaacctctgcttatccattgcaagagaggcaagcaccgaactggctgtgtggtcggatgcttgaggaagctgcaggaatggtgcttgtcttcagtcttggacgagtaccatcgctttgccgctgcgaaagcgaggatcactgaccagaggttcatggagctgttcgacgtttcaagcttgaagcacctgacaccctcacactgttaaccaaggcgtgtgatcgattggtcccccaactctagtacatctcaaagcctatcttccgtcagctactgaaccgattcagttgtgaataattttggaatccgctagagtccgtgaggtagtgatgaaaccattgcaaaacgtttgtgcttgaatggtttattttcctcctgcatagcgcactgcagagcctgagaaccagattgctgtagtcgatttgcgaggggttctcttttttttttggggtacctttcgcgaggaactcgccattgtttttgggtactgaagcatgtactcgagcagctttgctaaggagaaatgaactattctcaaagtgcaaaaaggcttgtctcttcttgcatgagtgtagttagggatcctgcatattaagaagaggcctaaacagcatgttaattgcctagataggcttc

SEQ ID NO: 465 - DNA, 1948 bp, Zea mays
ccgcccgaagctgagcagtgactgtgagcaggcgtttcttcctccactggtctcggtctttgccgcaaatatccgctcgccccccttctcggcctcgggctctcactcaccctcgaccctcctcgcgcagcgcagccgcacgcgcgccatggcggcgctctgctccgcctccccggccatctccgcggcggcgtccctcgggtcgcccgcgcgcgtggtcgcgtccttcctccgcctgcgcctgcgcctgcgcgccgccaagcgctcctgctcccacgcgccggcgccgtcgtggcgggcgcgacggcgcttcgcggcggccgcggcggaggcggaggagtgctcgggtgtggagacgctgatcccgcccgacaatcgcatccccgccaccatcatcaccggcttcctcggctctggcaagacaactttactgaatcacatcttgactgcccaccatggaaagcgaattgctgttattgaaaatgagtttggagaagtagacattgatggctcactagtcgctgcacaaaccgctggagctgaggacataatgatgctaaataacggctgcctttgttgcactgtgcgtggtgatttagtccgtatgattggtgaattggtgaacaagaagaaggggaggtttgatcatattgttattgaaaccacaggtctagcgaatccagcacccattatacaaacattctatgcagaggatgtagtttttaatgatgtcaagctggacggtgttgttactttagttgacgcaaagcatgctagacagcatttggatgaagtaaagcccaagggtatagtcaatgaagcagttcagcaaattgcctatgctgacagaattatagttaacaagattgatcttgtcaaagaacctgaagtgttgtccttggttgagcgtataaggggtatcaaccacatggctaatttgaagcgagctgagtatggtaaagttgatttggactatgttcttggaattggaggatttgatctggagagttaccaatttaggactgtggggataaaggaaattcattctggttacaggattgagagtgctgttgctgaaaagtcacatgaagatcacgcagagcatgatcatgaacaccatgagcatgagaatgaacacgaccatgaccatcatcaccatcatgatcatgatcatgatcatcatgcacatgaccacactcatgatcctggtgtttcttctgctgacatgtggttggggaacctactgctggaacacagcgaggatatatacaggatgaaaggtctgctttctgtcagtggaatgccgcagcgatttgtctttcagggagtccatgacattttccagggatctcctgagagaatgtgggagccaaatgagccgcgcatcaacaagattgtcttcatcggcaggaacctcaataaagaagagctggataaggggttcaaggattgcctactgaagaaatagagtgatttcagaatagtcgggatatagatctccagttttggccttcttcgaatgtagtcagattcacatcaattcatatctgttggagtggattgaagacagtgaagcttgaactaaattctaccccaattcatccgacatatgtagattaaggtgaatccgacaacatctaaacaaggccttcatgattttgagttttgtggccgcagaacttatcctcgatatctgacatgacatgtaacgagagatgtatcgaatcgatagcattattgcaaccttgcatcctcacgaaatagtctatcatagttttattgcacggtgttgcaatgtaaccaatagagattattataggatgtctttgtctctgtgatacgaggaaatcatattgcatggtataatatactattgaatgtgttagcaatcaggagttgtttaaaattaacatttttgtttaatctatgttcgttacggtcatgtttg

SEQ ID NO: 466 - DNA, 1369 bp, Zea mays; identical to SEQ ID NO: 398

SEQ ID NO: 467 - DNA, 2263 bp, Zea mays
cgaaaaggtgagataaaacgctaggagccgaggagaacaactgaatgatccaacaccgccctcttgtgctctccctgccctcccccgctataataccgccacgccctcgtcgccatcgtcaccacaccaccactccctccctgccctctcactcccgatccctcctccaccaccgcttcctccgcgtcacccatctcgtcgtcgcctcacgaggcgaccagcggcggaccctccgcggcgcaaccatggggctcttcactgtgacgaagaaggccaccacgcccttcgacggccagaagcccggcacctccggcctccgcaagaaggttactgtattccagcagccccattatctgcagaactttgtccaatcaacattcaatgcccttcctgtggatcaagtaagaggtgcaacaattgttgtctctggtgatggccgctatttctcaaaagatgctgttcagatcataacaaaaatggctgctgccaatggagtaagacgtgtttgggttggacaaaacagtctcatgtctactcctgctgtatctgctgtcatccgtgaaagagttggtgcagatggatcaaaggctactggtgccttcatcttgacagcgagccataacccaggtggtcctaaggaggacttcgggatcaaatacaacatgggaaatggtgggcctgctcctgaatctgttaccgacaagattttctctaatacaacgacaatctctgaatacctcatctctgaagacctaccagatgttgatatttctgttgtcggtgtcaccagcttcagtggacccgaaggcccctttgatgtggatgtttttgactctagtgtagattacataaagttaatgaattatgatgcactccatggtgttgcgggagcttatgccaaacacatctttgtggaagagcttggtgctgatgaaagctcactgttgaattgtgtcccgaaagaggactttggaggtggtcatccggatcctaaccttacctatgcaaaagagttggttgaacgcatgggtcttggaaagtcatcctcaaatgttgagcctcctgaatttggtgctgcagctgatggagatgctgaccgcaacatgattcttggtaaaagattctttgtgacaccgtcggactctgttgccattatcgcagccaatgctgttcaatcaattccttactttgcttctggcctgaagggagttgccaggagcatgccaacatctgctgcccttgatgttgttgcaaagaatttgaaccttaagttctttgaggtgcctactggatggaagttttttgggaatttgatggatgctggaatgtgctcaatctgtggtgaagaaagctttggcactgggtctgaccacattcgtgagaaggatggcatctgggctgtgcttgcatggctttcaattattgctttcaagaataaggacaaccttggaggagataagcttgtcactgttgaagatattgtccgtcagcactgggccacatatggtcgccattactacacacgctatgactatgagaatgttgatgcaggggctgctaaggagcttatggcaaacctagtaagcatgcagtcatcactttctgatgttaacaagttggtcaaggagatccggtctgatgtttctgaagtagttgcagctgacgagtttgagtacaaggatcctgttgatggctctgtgtccaagcaccagggcatccgatacctctttggagatggttcacgactggtgttccgcctctctggaaccggttctgttggtgccaccatccgtgtctacatcgagcagtacgagagggactcctctaagaccggcagggattcacaggacgcccttgctccgctggttgatgttgcgctcaagctctccaagatgcaagagtacactggacgctctgcccccaccgtcatcacataaattttgaagagtgttttagaatgagttgaggcgcttacacaaactttcattccggcctcttgttccatagtttttcttgcatgttacatctcaccgatgaataaaatgtatgtatcagacttgtctcgtttttttgcccatccaagcagcaaattagccgctggcacagcatgcggtaataatcttgtcacagtgctgtaattgggagcgtttttcttgttagaagtgtttctggtttgtttgagcatttgcggatcgatttttctttctgaagagtatataaacattttactcacctgtatacactgtcgcagtgtcactaatgt

SEQ ID NO: 468 - DNA, 1491 bp, Zea mays
cacggagcaggatgatggctgccgcctgccggccagtcatttgcgcggcaatccttctcgccaaaagcagggcacgcagaccaccaccacagctgagctgaccagcagcagaacagaagcaaacatcaaaagaattgaccaccagctcctgcagagttcttcctctcgccttgttgttgctcgcgggcatagaccgcagcgcagctcgcacagaccgggtaccacttgtttgtcgagttgtgggggaagggggcgagcaaggaagcaaagctagtggtaggccggcaaggcggcctggtggagacctcgagtcgagtcgaccatggtggcgcgcgggcagggcggagacagggcggaggaggaggccgcggcgcggtgggagagcgagaaggaggcggagatcgactacgtgttcaaggtggtggtggtgggcgacgcggcggtgggcaagacgcagctgctggcgcgcttcgcgcgggacgagttcgcgctcgactccaagcccaccatcggcgtcgagttccagacgcgcacgctcacgctccaccgcaagcgcgtcaagacgcagatctgggacaccgccggccaggagaggtacagggcggtgacgagcgcgtactaccgcggcgcgctgggcgccatggtggtgtacgacgtgacgcggcgcgccacgttcgagcacgtggcgcggtgggtggaggagctccgcgcacacgccgacgggtccaccgtcgtggcgctcatcgggaacaaggccgacatgcccgcggcgcggcgcgaggtgcccgccgacgaggccgcgcgtctggccgaggaccagggcctcttcttctcggaggcgtccgcgctcacgggcgacaacgtggagcgcgccttcctcacgctcctcgaggaggtcttcgccgccgtgtcgcgcagggcgctggagctcgacgaggcccgccggatgcgcggcgaccagggcgacggcggcggcgaggtgctgtcgctcaaggggaccgcggtggacgtgggctccatcatggagaccagcgccatgaagaggagctcgcagtgcgcttgctcatgacgatgcatggctcaagcactgacaagttcgagcaacaaaggcgccgcgagaaaatctaggacagcatcacattggcaggagaaatcttcgacatctcaatccgtacacaacaatcgacaaccctgtgactgtgaagcaagcacatcactacaagtcctcgcaactctagtctccactctccactctctccagcatgcgaacactatgttcgtaatgtctctcttactcttctcctgcaacagctggtagtccttctttgaaccatgtgtaaagtcctccttccagatggtacacgttgctgtagccattcaggaccaacaagtacgcagctatcagggacctgccaaaattcaaccggaacagagcataagctccaacgctgatattatttgctctcgagaaaatagcacgatatttcgaac

SEQ ID NO: 469 - DNA, 1230 bp, Zea mays
ttgagaggcacttgaggcaggcagcagagtgcgctgaacaccggcatggacaccatcgtctctctctcgcctcagatgcttcgccagcgccagggccaccagtctactgcatcatcatcatcatcagcttgggctattaccacagctaggatcggtcgccacctgtctactgcatcatcctgttccagcccgcggctgctcatcaagcagagggcgacggcggcatcggcaccggcacagaaagagaaagaggtcgtcttcgtggctggcgccaccggcagagttgggtcccgggccgtaagggagctcatgaagcttggcttccgtgtgcgcgctgccgtcaggaacgcacagagggccacgtcgctggtgcagaaagagaaagagcagcagctgcttgagcttgtggagtgtgacctggagaaggagccgcaggaaggcatcgtttcagccatcggcaatgcttccttggtggtgtgctccatcggtgcaagcgagaaggagatcctggatgtcaccggcccataccgcatcgactacatggccaccagcaaacttgtacaagctgcgactgctgccaagcaggtggagcacttcatcctggttacatccctggggaccaacaagatcggcttccctgcattcctcttgaacttgttctggggagttctgttctggaaaagacgagctgaagaagcactcatcgcaagcggcattccctacacgatcataaggcccggaggcatggagaggccgacggatgcttacaaggagacgcacaacctggtgttggcaccggaggacacctacgtgggtggccaggtatccaacctgcaggtggcggagctcatcggatgcatggccaccaacaggagcgcggcctactgcaagacggtggaagcggtggccgagatcaccgcgccgttgctgcccatggagcagctcctctccgcaattccctccaagagggaacaacgccctgcagatcgatgagctagacggcctcaaagcattgcatatgcttctaggttttgttttgtatgcaatgttgtgatatcagagagatatctaagtttttatattttatatgatgacgatgagaactaagtacaagtgcttttattttttattattcctaaagacaacttttgtatatgtaacatcatgaatgtttgaggtgtctcatgtgtaactttaattaatatcaatttatgcatgaaatattatgga

SEQ ID NO: 470 - DNA, 1887 bp, Zea mays; identical to SEQ ID NO: 410

SEQ ID NO: 471 - DNA, 1599 bp, Zea mays
gtccacctctgccactacgagctcgtccccgtcttgtttcgtctcctctcgtctcgtcacgcgagatatttctacgggacgggacccgcgttgcttccccgcctcgccgtcccgcgcgcgccagccgggcccggggaagccatgaactgcctccagaacctgctcaaggagcctccaatcgtggggtccaggtcgatgaggcggccctctccgctgaatctggcgatggtccgcggcggcagtcgccgatcaaacaccgtcaaaactttgcaggcccctggggcgtccacttccggtgccgagagcagcgccgtggagatgggcaccgagaagtccgaagtgtacagcactaacatgacgcaggctatgggagcagcgttgacatatagacatgaactcgggatgaactacaatttcatacgcccagacttgattgtaggatcctgcttacagagtccacttgatgttgataagcttcggaagattggtgtcaaaactgtattctgcttgcagcaagattcagatcttgaatattttggagtcgacatccgtgccattcaagattattctctacaattcaaagatattgtgcactgccgtgcggaaattagggattttgatgcttttgatttgcgattgaggcttcctgctgtggttagcaaattgcacaaacttatcaactgtaatggtggtgtaacatatatacattgtactgctggacttggaagagctcctgctgttgcattggcttatatgttctggattcttgggtacagtctcaatgaaggacatcggctgctacagagtaaaagggcttgctttccgaagttggaagccattaagttggcaactgctgacattctgacaggattatccaaaaacacaatcactttgaagtgggaagctgatggttcttcctctgttgaaatttctgggctcgacattggctggggtcagagaattcctttgacatatgatgaggagaaaggagcttggtttcttgagaaagagttgcctgaaggacggtatgaatacaaatacgtagtggatggcaaatggctatgcaacgagcatgagctgataacgaaaccgaatgctgacggccacgtgaacaactatgttcaggtctccagagacggcacgagcgatgaagagaaggagcttagggagcggttgactggtccggaccctgatctcacggaccaggagaggctgatgatcagagagtacttggaacagtacgcggatgccgccgagcgctaggaggtccagaagaatgatgatgactgaggaagagaagagacacaccatgagacgacggaccgaagccgacctgaccgcaccttcctttacggagaggtcgggcttcccctctcttgtcaatcaaatactcgtagcttaaccgtgcaaaagggcacgttctgctcgcatacttggagaatgatgatgaaggagcaaactgtacgtattgttgaacagcagctgtgcagaaataacaaaggtagtagcgtaaaactactgtactgaccataatgttactactgtatgctccttcttggctatgaataataataataataataaaagagtaaataaacc

SEQ ID NO: 472 - DNA, 588 bp, Zea mays
atggcgttgctctccgccacttcgcccgccaaggcgcacctctcggcgctcctctcctgccacgacgagccgcagcagcaccaacacgcgctcccggtcccgcacccgcgctgcttcggcggcggcaaggccaggcggcgcgcgcggggcaggtgcgcggcgtcaatgcggccgcccgacgcgtccgtcgctcccgcgtccgcgcccgcgggcgaggcgcggcggaagaagaagccccgggtgctggtggccggcggcggcatcggcgggctggtgttcgcgctggcggcgcggcgcaaggggtacgacgtgacggtgttcgagcgcgacatgagcgcggtgcgcggggagggccagtaccgcgggcccatccagatccagagcaacgcgctggccgcgctggaggccatcgacatgtccgtcgccgaggaggtcatgcgcgtcgggtgcgtcaccggcgaccgcatcaacggcctcgtcgacggcatgtccggctcctggtacgcccttctcctggctgcaacgttcacttccttcctctgtttctgcgtgcgctgtggttgcgtcgcgcctttgcatctgccgtga

SEQ ID NO: 473 - DNA, 4077 bp, Zea mays
atggaaccacttgtgagaagggagtctacatttaattttaaaactgttacactacctgtgtctactggatggagggttccattgcccatcatccaccagcgaagaaacatagggaaaagggaaaaaagatggtcgtgctgccgcgccattatagccccggaatccgcggcgcgcccccgccttccgtcctctctcccgccacaaatcgccgggcgcccgcgccgccccagcctcccttctccctccctccctcatcccctccgtgtcccggagcccagggagcggaggcgggcgggccggcgggcggccatggacgtggactgcgtctcgctgcccgacgccccggcgggcgacgtggatggcggcgccgcccggccgtggcccaaggccgtgaccaacggcggcgtccacgagctgctggagtgccccgtgtgcaccaactccatgttcccgccgatccaccagtgccccaatggacacacgctgtgttccacatgcaaggccagagtacacaaccgttgccctacctgcaggcaagagctgggcgacatcaggtgtctggcgctggagaaagtcgccgagtcgctggagctcccctgcaggtactactcgctggggtgcccggagatcatgccttactacagcaagataaagcacgaggcgcagtgcggcctgagaccgtacaactgcccctacgccggctccgagtgcggcgcggccggcgacatcccttccctcgtctcccacctgagggacgaccacaaggtggacatgcacagcggctgcaccttcaaccacagatacgtgaaatccaacccgcgggaggtggagaacgccacctggatgctgacggtgttccactgcttcggccactacttctgcctgcacttcgaggcgttccagctcgggatggcgcccgtgtacatggccttcctccgcttcatgggggacgagaacgaggccaagaactacagctacagcctcgaggtcggcgccaacgggaggaagatggtgtgggagggcaccccaaggagcgtccgcgacagccaccgcaaggtgagggacagccacgacggcctcatcatccagaggaacatggcgctcttcttctccggcggggaccggaaggagctcaagctcaggatcaccggacggatctggaaagagcagcagacaccagacggcgcatgcgccgcgaggcaaacaatctcctcttctctccccagattcactcaccgtccgtccgtccagggagccatggcagcagcagcagcagcctgcatctgtctgcagctctctctcccaagcaaccattcttcctctgcatgtcctccagcatacaggaagcgtgtcgcgctagccccagggagaggaaaccgtcttctctgcactgcatctggcgcctcttcttcttcttctgtggtggtgaccaaggagcaggaggaaggatctcctgagcccgaaatctttagctacaaagacgaccccaacttcaggggctgcaagggctgcggcagggacgagcttcagaggggctgcaatggacaaggccggatccagggcggcatagccgccgtcccgggcttcggctggtggcccatcaaggcgtaccggccgtgccccggcttcgtcgcgtccggcggccgctaccggcgccagggccaaagcatggacgacgttgcatccggcagggggaaaaagaaaccctctcccgccaaaaaacaagcttaacccctctagctagtttatgttcatcaggtgaattcagaatctacccaagatgggagggaactgggggaagctcaagttattcaggaacagcagttttttttgggtccacaacgccaatgtatatgcactagtttggagtactgtttgcagaaacaacaattgtatcagtagcttggaacatctgactgtaccctaattgtattattgtcttcatcaagtggcgaatgcaggatcttgcactggatcttgccggacaccgacttggggatggcgtccacgaagcgcagcagccggagcttcttgtacgacgcaacgcgccccgccacgtacgccatcatgtccgcctcgctctccggcgcgccacgtcgccgcaccacgcacgacgccgggacctcgccggcctcctcgtccggcagcctgcgcccgcatacatgcatgatgacccgcaggaacacacacgcacaatctccaactgcatgccgcggtccgctcggtcgcttacccgaagacggcggcgtcctcgacggacgggtgagacagcaggatggcctccagctcggcaggggcgacttggaagcccttgtacttgatgagctccttgatgcggtccacgatgaacacgtcgccgtcgtcgtcgatgtacccgacgtcgcccgtgtggagccaccccgcggcgtcgatggtgcgctccgtctcctccttcttcctgtagtagccctgcatcacggcctggctccgcacgcagatctcccccggcgtgttcttgggcagcgaccgccccgtgtcggggtccacgaacttcacctccaggttgggcaggatgaagccgaccgacttcttcttggcgacctgcaccgccgaccccacgtcctcgccgccgccgctggcgtgcgtcagcgtgatgcagctgtgctccgtgagcccgtacgcctcctccacctgcacgcccgggaacttgcgctcgaacgccgccaggaggtccggcgcgagcggcgcggcggccgtcatgacggacctgagggccaggccggacaggtcgaactcgtcggccacggggctcttcaccatggccagcatgaccggcggcacgacgggcgcgaacatgacgcggtgcgtcagcagcgcgcccaggaacgcgcgcaggtcgaagcggtccatcaccaccaccgtgcccttgtgccgcagcgtggcgcagcagatgccggtgatgccgtagatgtggaagaagggcatcaggcccagggtgaccacctgcccgaccagctcctgcccgacggcgaacatggaggagcagaggctggacaccaggttccggtggctcagcatcacgcccttggacacccccgtcgtaccagacgagtaggggagcgcgcacaggtcggactgctgcgccggctcaagcgccaccaccggcgcgcccgcgcggtccgccatggcgaggagctcgtcccagcctatggcgccgggaagccgcgccacgtccccgatgccgatcaccggcacgccagcgtccttcaccttgtcgtaggccaccgcgtcggcgaccacgagcctggcctcggagtcctccacctgcttcttgatctcggcggcgacggcgcgcgggttcacgccggagaagaccgctccggcggacatgatcccgaggctcaccacggggtacaccgccaggttcgggagcgcgaccaccacgacgtggcccctgcggacgccgatggaccgcagcgccctggcgaaccgcgccacgtcccggaccagctcgccgtaggtgtaggaccggccacccggcgcggcctccacgagcgccgtcttgtccgcgtaggcctcggcgtccgccagcacgaactccggcacggtgacgtcgtctggtacggccacgggcgggaaccggctccggaagatgtgctcctcctcagactcatgcaaatgcacggcggcgatggccgcgtcgcccatcctcagctgctgctggtggtggtggttgtgggtatggagctgaaggaagggcgctgcgttggcatttgaagagacgaccggaggtcttggcattgggccacgcgaggaaggtgaaggcatgttggtggtggcgacacaattcttgcgtggtgtcaagaaaggtggtgtgcaggtgaggatcggttgtgtcatggcctttgacctcgtagaacttggctgggtcatgctcatgtcctttgagctcacagagcttagagccaccggtcaacagtgacacgcgtgaaagcagcgttgtcgtgttcatcatagttcgcaatagagttcagatgatataatagttggttaagtgcatgcacaaattcttcaaatgaaagaaatatcaattcgccc

SEQ ID NO: 474 - DNA, 2470 bp, Zea mays
gctcaatcagaggaaagcttccacaccaccagcccaccaccatgctgagcacaacgtgggcatcgccgaaggcgacccccatcccctcgtctccggcctctcagacggcgacccggctccatcccgcctccagcagcaaccgaacgctccgccttgtcgcgcttccctccccgtccgcgccgcggcggaggcggaggcccggccttcctcctcctgcgcgcgcggggctcgtcgccaccgcggcaatgccggcgccggagcccaaggcgcgggtcctggtggccggcggcggcatcggcggcctggccttcgcgctcgccgccaagcgcaaggggttcgaggtgctggtgctggagcgggacatgagcgcggtccgcggggaagggaggtaccgcggcccgatccagctgcagagcaacgcgctcgccgcgctcgaggccgtcgacgccgccgcggccgacgagatcatggacagcggctgcgtcacgggggaccgcgtcaacggcatcgtcgacggcgtttctggctcctggtacatcaagtttgatacgtttactcctgcagctgagcgggggctcccagtcacaagggtcattagccgcatgacactgcaacaaatccttgctcgagcagtcggcgatgatgcaatattgaatggaagccatgtagtcgattttatagatgatggcagtaaggttactgccatattggaggatggtagaaaatttgaaggtgaccttttggttggcgccgatggaatatggtcaaaggtgaggaagacactattcgggcattcggatgccacctattcaggttacacttgctacactggaattgcagattttgtgccacctgatatcgatacagttgggtaccgagtatttcttggccacaaacagtacttcgtctcttcggatgtcggtgctggtaaaatgcaatggtacgcttttcacaatgaagaggctggtggcactgaccctgaaaatggcaaaaagaaaaaattgcttgagatattcgacggatggtgtgataatgttattgatttgataaatgcaactgatgaagaagcagttcttcgccgagatatatacgaccgcccacctactatgaattgggggaaaggtcgtgtcaccttgcttggtgattctgtccatgctatgcagccaaatctgggccaaggtggctgcatggctattgaggatggttaccagctggctgtagagctagagaatgcctggcaagagagtgtcaaaactgaaactcctatagacatagtttcctccttgaggcgctacgagaaagagagaaggctgcgtgttgctattatacatggactggcaagaatggcagcaatcatggctaccacctatagaccgtacttgggtgttggtctagggcctttatcgtttttgaccaagttgcggataccacaccctggaagagtcggtggcagattcttcatcaagtatggaatgcctacgatgttgagctgggtgcttggtggcaacagctcaaaactagaaggaagacttttaagctgccgactttctgacaaggcaaatgaccagctttatcaatggtttgaggatgatgacgcactggaagaagctatgggtggagaatggtacctcatcgcaacaagtgaaggaaactgcaatagcttgcagcccattcatttaattagggatgagcagaggtcactctttgttggaagccggtcagatcctaatgattcagcttcttccctatcattgtcctctccacagatatcagaaagacatgctactatcacatgcaagaataaagctttctatctgactgatctcggaagcgaacatggtacctggattaccgacaatgaaggtagacgttaccgcgtgccaccaaacttcccagttcgtttccatccctccgatgtcattgagtttggttccgataagaaggctatgttccgggtgaaggtgctgaacacgctcccgtatgaatctgcaagaagtgggaatcggcagcaacagcaagtccttcaggcagcatgaatggagacactggctaccaccactatcatcagccacactgtactgtacagcatccggtaaagacacaacactgcatcacggaaaggatacactcgttctcgaatatttgtcgtctgctagttcaattttaaactaaaacgtgacaaatgaaaaaacgaaggaagtagaagatatgtcaaaacacatgcaatttttgcatccatgaagatgccaaacaggatcttgaatactagcacctagcggattgaaataatgaagttgcagttctgcgtgaactggattgtacgatagggatagacaatttagctgttgtcggactgtgtacatcgttgtaccatcaccggaaatattgtacaccgagaagccatattgtaattacggcatgagaacagtaacactttgatcatgtaatacagtatatagttgtttagcaa

SEQ ID NO: 475 - DNA, 2415 bp, Zea mays
gtggtatgtggaagtgaagtgtggatagacagcgcggcgagacaagcgaacctctgcggcccgcaggctccagcgctcatccacctctcatggccaccgccaccgcttcccgcctcgccgtcctcgcgccgcggccgtcgcgccccgcaccggggcgccggcgacatgctcctgctaccggtcgtggtcctcccctccctcgcagtctctacgcagcgccccgcggccgcgttctctgcctcgcggcccccgcgcccgctgctgcctccaccaccgacgccggccaggaccgcctccagaaggtgcccatttcgaatatcaggaacttctgcatcatcgcgcacattgaccatggcaagtccacactggcggataagctgctggagcttactggcacggtgcagaagagggagatgaaggagcagtttctggataacatggacctggagagggagagagggatcaccataaaattgcaggcagctcggatgcgctacgtcatgaataatgagccttactgcctgaatttaattgatacaccagggcatgttgatttctcgtacgaggtttcccgctctctagctgcctgtgagggcgcacttcttgttgttgatgcttctcagggtgttgaagctcagacgttagcgaatgtgtaccttgcattggaaaacaaccttgaaatcataccggttctaaataaaatagatcttcctggtgctgaacctgatcgtgtcgcacaggaaattgaagagataattggattggactgtcgtgatgcaattcggtgttcagcaaaggaaggtataggcatcactgaaatattagatgcccttgtgaccaaaatccccccaccaaaagatacatcaaaagatcctctcagggctcttatatttgacagctattatgatccatacagaggtgtaattgtgtacttccgtgttattgatggcagtatgaagaaaggggacaagatatgttttatggccaatggaaaggaatatgttgctgaagaaattggtgtactatccccaaatcagatgcaagtttctgaactatatgctggcgaggttggttatctctctgcttctataagatcagtagcagatgccagggttggtgatactattacacattattcaaaaaaagcacatcatgctttaccaggatattctgaagccactccaatggttttttgtggcttgttccctatagatgctgatcagtttgaggagttgcgggaagcgctggaaaaacttcagctaaatgatgctgccctaaagtttgaaccagaatcttctagtgccatggggtttggcttcagatgtgggttccttggtcttctccatatggaaatagttcaggaaaggcttgagagggaatacaacttgaacttaataattactgcaccaagcgtggtataccgtgtgaactgtgctgatggtgaaactgttgaatgttcaaatccatccttgcttccggagcctgggaagcggaggtctatagaagaaccatatgtgaagattgaaatgcttacaccaaaagattatattggttcaataatggagctgactcaagacagaagaggtgaattcaaggaaatgaacttcatcacagaaagcagggccaaacttatttatgagctaccactagcagaggcatatgctgttggaagggcacttactcaaaagctcaaggaacttatacctcggcaaatgtttagagttcctattcaagcatgtattggcacaaaggtgattgcaagcgaagccctgtctgccatcaggaaggatgtcttatcaaaatgctatgggggtgatatatcaaggaaaaagaagttgctgaagaagcaggctgaaggaaagaaaaggatgaaggcaataggaagggttgatgtccctcaagaagcattcatggccgtgttgagactggaaaaggaggtgctatgaaagtgctcatgaacctttgtgtctccgtaaattaaagacctcttcctgtgcgccactcacaagtatagtcagacgagagctttgagacaacaggcattcactatggttcaacctgtccgctctggaccataggaaccagtcaagcacagatcactcccagaacaaaagcaggtaaatctggcattcgttcgctattttttgcttttttatgtgtcaggctatgatggtaaaacaatcatgtcgccacagagttttgccaggcacatataggaaattcatatgtcaaagtgcatcatgtagtccaattccttgtaacgcatgctacagagacttgtttctacagttgaatataccttgtaaggctgggaccaacagatcgtgcatatgcaaaacaagaggtttgtaatattttatacggtagacagaattgtttataaagtacaatttaaagtatgaggtgggacggtag

SEQ ID NO: 476 - DNA, 2036 bp, Zea mays
tttttcaaccaggaaaaggtcgggaaaaaaatccgaaatggccgctagtggcctcggtctctccacctccttcctccccggccacgacaccctcctccggcgccggcgccggcggccggcgggccacgccgccgcgtcgttccggccggtgacggcggagctcggcggcgtcgcgacggagctgggccgccagctggtggaggcggtgggcgtggggctcccctgcaccgtcatgcagtgcggcgacgtcatctaccgcagcacgctcccccggaacgacgggctcaccatcacggcccccggcctcacgctcgcgctcgctaccgtgtcgtacctctggtccacgccaggcgtcgcgccggggttcttcgacatgttcgtcctcgccttcgccgaacgcctcttccgccctaccttccgcaaggatgacttggtatttgggaagaagctcggggagggcgcattcggggtcgtgtgtaaggcttcactggcgaaccccgaagcggcgaagaaggtaaggctaatgatatctataacactggcaatttgtgtcaacaagtcataccaatggacgtctaaaaccttttgttcatctttgaagcaaggggatttggtcgtgaagaaggcaacagagtatggtgcagtggagatttggatgaatgaacgtgtcaggagggcatgcgctagtagctgtgcggattttatttatggcttttgcgagacaaaagcaaaaggtaagggagctgaagaatattggcttatttggcgttttgaaggtgaggatacactttatgatctcatgcaaagcaaggaattcccttacaatgtggagacaaaaattcttggcggtatccaagacttgccaaagggaatagcgagagagaataagatcattcaaacggtgatgagacaactcttatttgctcttgacggacttcattcgacaggaattgttcacagagatataaaacctcaaaatgtgatattttcagagggatcacgaaccttcaaaattattgatcttggagcagcagctgacttacgtgtaggaattaactatattcctaaagagttccttttggatccaaggtatgctgctccagaacaatatattatgagcacacaaaccccgtctgctccttctgttccagttgcaacaactttgtctccagtcctgtggcagctgaaccttcctgacagattcgacatatatagcttgggtctcatattcttacagatggcattcccttcactacgaactgatagcaacctcatacaatttaatcgccaactgaaaagatgtgattatgacttacaagcttggaggaatctggtggagccacgagcgagtgctgagctccggaggggctttgacatcatggatttagacggtggtatcggatgggaactcctcacctcgatggtccggtacaaagcacggcagaggaccagtgctaaggccgcattggcacacccgtacttcaaccgtgaagggctccttggcctctccgtcatgcaaaacgtacggctgcaactgttccgcgcaacccagaaggactacagtgaagcagcgcggtgggttatcggcctcatggcaaggtcaggaactgaagatgtgggaggctttacagaagcacagcttcaagagcttagggaaataaaaccaaagaaaagcagcacccagcggaacgcgcttgcctccgtgctgcgcctgcagaggaagatcatgagaacgatcaaggagagcatggacgagctcaacagccagcgcaaaagcatctggtggagccggtggatacccagggaggagtaggccggccgcaggcgcacatgtacatcgtccacttctgtatgaaacgtcacctattagcactggtgaattggtgatagtataatacactatcctacttactgctttgtacatgctgacgactggtgagtaaaattcatctgaaaaaaaaatcggagtaacgcgatgtatagctgtaaatattttgcattgaagcatcatgatttttgagatcagctctctgctt

SEQ ID NO: 477 - DNA, 2978 bp, Zea mays
gacgcagctaacggtcacccccttccctccctccatcccccttcgcctcgtcagtcgtctctgcctctttccttcctcatcttcgtctctttcctcaccccgacccccccgcaccgactcctccacgcgcacgcgcgcggcggcggcggcggagtcgggagaggtccctggtgctgcttctcgctcaacccgtacgctactccttcctctccgtatggcttccgccgccgtggaaaccctcgtctcgttcccaatcgcatcccgtccccgctcgctcctacgccccttcccgcggcgacctgccgccgccgccgccgccgggggatgcgcgccttcgatccggatatccgccgtgccgccgcggggcctcgggctcgcgctggtgcaccgccgcgcgcgccgctgcccgccagcggcgcgcgcgaatgttgagcacggcggcgacggcgcctctggtaacggcgagccgtcgtcctcgtccggggacggcgaccgcgacgcggctgcggactcggggggcgacaccaccggcacgagcaccacgagcgccgcccagacgccgccgccgccctcgtcgaagaggggcgaaaacaagtggcggcggaggctgactaagggaggtggcgtcgggcgctggctatgggagcccatagtccaggggcgggagatgggcttcctcctgctccagctcggcttcgccgtattcgcgctacgcatgcttcgaccggagatcgcgttgcctggctcagagccccgcccgcagaccacgtacgtcagtgtaccgtacagcgacttcctggcgagcatagacaaggaccaggtgaagaaggttgaggtggacggggtgcacgtcatgttccgactccgtccagaggttgagtcccaggtccgtgtggagcagacaccatcacagcgcggaacagatgctgtcgtcgataatgctggagtctcgaggagaattgtgttcaccacgactcgtccagtggacataaagacgccatacgagaagatggtggaaaacatggttgaatttgggtcaccggacaagaggtctggcggcacgctcaattctgcgctggtagctcttatttatgtcgtattgattgcagtagttttgcagcgtttgccaataagcttttctcagcattcagccggtcagttgaggaacaggaagaattctaattctggtagagcaaaagtttctgaaagtacagatatagttacatttgctgatgtggctggagtagatgaggcaaaagaagagcttgaagaaattgtgattgatgctgttgcaaaaagccgtgatggtcgatatcgcattgtcagtaatgatgaacgtgagcagacactaaaccaattgctcacggaaatggatggcttcgacaccaattcggctgtcattgtactaggggcaacaaatcgagctgatgttttggatcctgcccttaggcgacctgggagatttgaccgtgtagttatggttgaagctcctgataggtttggaagagaatcaattctaaaagttcatgtgagcagaagagagcttccactgagtaaagatgtagatctagccgatattgctgcaatgacaactggttttactggagcagaccttgcaaacttggtaaatgaagctgctttgttggctgggcgattaaataaagaaattgtggaaaagattgacttcatccatgcggttgagcgatctatagctgggatagagaaaaagcatgcaaaattgaagggtaatgaaaaggctgtcgttgcacggcatgaagtaggtcatgcactcgtgggaactgctgtagcgaaccttcttcctggacagccacgtgttgagaaattgagtatattgccaaggtcaggaggtgcattaggctttacatacacccctcccaccacagaggatagatatttactctttgttgatgaactacgtggccgtttagtaacacttctgggtgggagggcagcagaggaagttgttttagcaggacgggtttccactggtgcacttgatgacataagacgtgctactgacatggcctacaaagctgtagcagaatacggtcttaatcagcgcatcgggccaatatcacttgctacactgtcaaatggtgggttagatgactctggtggttctccatggggaagagatcagggccatctagttgatctcgttcagagggaagtaaaagcgcttttacagacggcactggaagtagctctttcagttattcgtgctaatcctgcagttttggaaggcctcggagcatatttagaagagaatgaaaaggttgaaggcgaggaacttgaagagtggctaaagtcagttgttgcatcaaaagagttgacctcttttatcagaggacagcaagagcaagttcttcagctggaagcaggctcctagcgtcaggactcttaaaattaattacttacagaagtcttccagcaattagaacatacaatgcgagttccaaggtatgcaatggaaaccttgatactggggacagatctgtggccatgtggtggattgtatgacctctcccacccactcatgctaagacaaacttgggttgggcgcccacccttcgttcgttgaatcatgagctcgagccttagaggagaattttcagaaaaggaaatctacatgcccgagtgaccatgtaaatatttaccattgcagttcgcggacccatgagtaccaaaaaaaagagatgattcatattgacctgtaacattgtaagatcaacctcaggaatatttgaagcggttagttttcacatgttcatagatcgggtcggtgttacacatgtaaaagattctttttttgccctaggttcttgtcctcaccctgttagaagttattttcctctttacaatatgatcctagagatgatcaataggataattaatgcttatacggactatggttcctgtattgatatactctttccaatatacttcgggcttcaaat

SEQ ID NO: 478 - DNA, 1377 bp, Zea mays
ccgacgatgactgctcggagagtttcagttctgctacgattttcaggcaatgccaaggcccgaaaggtcgccgcttggtttgctggacgggccacgcccacgcccaaggccctccgccgtccgccgttctcttcggtcggcagcctgcgcggcaacgtgtacgtgctggcgaccacagacccaagcaccggaaagatatttctttctgctcacggctaacggcttatacgcacacaaaagagagggtctggtgtgtggatgattccagtcctcctcctgttctttgtttcccgtcccatcgtgtgtgagcgcgtctgctggtctgccaagaggaggaaaggaaggaggagcaagtagagatggcttgccctgcgcagtccatgctctccgccagcggctgcatcttcctgaggagcaagcctcaggcggcatcccaagtgcgagggggcatcatcggcggtggccgcagcagcaggccgttcctgctcacctgcaacgcttcctcttctccgtccccttcctcgccggcgccggcgcaggaagaccccgactgcaacgaggaggagtgcgccccggagaaggaggtcgggagcctgagcgccgagtggctggccgaggagaggacccaggtcgtcggcactttccctcccaagaagaaagggtggaccggcttagtggagaaggacaccgccggccagaccaacatctactccgtcgagccgatggtgtacgtggccgagagtgccatcagctccggcacggcgggtacgtcggcggagggcgccgagaacacggccgccatcgccgcggggctcgtcctcatcaccgtagccgcggcctcgtccatcctcatccaggtgaacaagagccaggtgccgcaggtgccggaagccgcctacagcggcccgccgctcagctattacgtcaccaagttccagccggcggtggctgcgccggcgcagaccctcgaggcccccgcccccgacgaggcacaagacggcgccgccgccaccgtcgaggctccggaggtaccggcaccgcagctgtcgtcgtgagctgattcggttttgtggcatgcagctttatactacggatgagccagtagcgcatgatgatggaagatatgaatccatgatacaagcatttcggaattgtattaaagtttgtatatacacatgcattcagctcgcgcattctgtatgcttatttgaattcagacatcacggcactcccacaaaccattcagttgtaacaaggtgaacataccattttcacgcgtagtatttgaacataatttttatttttttggggctcactcgtactacatgaaacgaattcaaacaacgacaaaaattggagcgaagtggttacgttcac

SEQ ID NO: 479 - DNA, 2283 bp, Zea mays
gatcagtgaattcgcaccatctccacgagagctaaaaccctccagaaacgcagggaccaaccgttgcggatgatttcctctcgtctcgtcccatactcccgtcctgtccgtcttcacctgcgttccccgggtcccgacacgccgctgtaccagtcccgcccgcctgcgcacttctcccacccccgcgccgcctccggcgccggcgagccctcccgacgctcctcgaacgatccgtccctgtcgcggcccttctctctgccgcttccagcccaaggggaggagagggagaggatgtggtcgtcgagccaggcgagcacgaggggcgtcgtggagatggggagggtggaggccgggccgtcgcatttccctaagagacccgcgcctcagaactccgccagggtcaatctgtcaaggacacacacagtcaaacctacctctgctggcgaccgttcaggaatttctgttaaatgcaacttggggtggtcttctcaaccatcgcctgacttgaggcatcactttagaggatactcatcagcatcagaggcagttcttacttcccaatctgatgtgagaaaactgtttgttggcaatgaaaaaatcggtgttctcttgctgaatcttgggggcccagagactcttgacgatgtgcagcctttcttgtttaatctttttgcagatccggacattatccgtcttcctaggctctttcgctttctgcagaagccacttgcaaaattcatatcagaagtgagagcaccaaaaagtaaggaaggttatgcatccataggtggcggttctcctctacgacaaattactgatgcacaggctgaagcacttagggaggcattacatgggaaagatgttcctgccaacgtgtatgttggaatgcggtattggcatcccttcactgaagaagccatagaacaaataaaacgggatggaatcacgaaacttgttgtgttgcctctataccctcagttctccatatcaactagtggttcaagtctccgtttattggagagcatattcagagaggatgagtatctcgtgaatatgcaacatacagttataccttcctggtaccaacgtgaaggatatatcaaggctatggcaactttgattgaaaacgaattgacaaaatttcaagaaccccaaaaggttatgatatttttcagtgctcatggagttcctctggcatatgttgaagaagctggtgatccatataaagcagaaatggaagagtgtatcgatcttatcatggaagaactggaaaaaagaggaataacaaatccgtgcatacttgcttatcagagccgagttggaccagtggaatggctgaaaccgtacactgatgagacaattattgagcttgggcagaaaggggtaaagagcctgcttgctgttcccattagttttgttagcgaacacattgaaactttggaagaaatcgatgtggagtacaaagagttggctttagaatctggcatcaagcactggggacgggttccagcactaggttgcgaacccacattcatttcggatcttgctgatgctgttattgaaagcctaccttatgttggcgcaatggcagtttccaatcttgaggctcggcagtctctcgtacccctcgggagcgtggaggagctgctagcagcatacgactcgaagcgcgatgagctccctccaccggtaatcgtgtgggagtggggctggacaaagagcgcggagacctggaatggtcgtgcggcgatgctggccgtgctggctctcctggtgctggaagtgaccaccggcgaagggttcctgcatcaatggggaatcctgcctctgttccgctgagccgacagttctgttcatgatggggtcataattttgctgcagccgaaggaagttttgaacttctgatgctgtatatgaatcaatttgccttaaatcgtcgatgggaaaagaggagaaaatggtaaaatatggacagaattcgacggtatatcatgttatattgtacctacctacatgacatgggacatgaaatagggctcagacatgcgctatggaacttggaatacacacaaacctaacacgccacatgctgcacaaactcctgcctactgccactagtaccttgtctgtccataagtggatgcgcgttgcttttagagaataatcatatgagcggatgagcctctgcattgtcatgtggatgctatatcaatccagcattccagctcaacaatttcagggttagctttagctcaagcagattaatttttcggttggctgagt

SEQ ID NO: 480 - DNA, 1230 bp, Zea mays
agagagtatctagctgggagcgtcgccggcgatgctctgctccggccgcatgctggcctgcaacggggtcttgcccggtcggctccggctgccgagggccgacgcctaccacctgcgcccaccagcgctcgcgcggaggtggcgcgtcgtggcctccgctgcggcgtccggcggctcccctgacctcccatcgtcgtcgtcttcgccgcctaatccgccgtttggggccggggacgaccagaccgccgcgtcacctgggttttgcatcattgaagggcctgagacggtccaagattttgcaaagctagacttgcaggagattcaggataatattaggagccgccgaaacaagattttcttgcatatggaggagattcgaagattgagaatacagcaaagaataaaaaatgtggaactcggaatttcagatgaagagcgtgaccatgaactccctgattttccatcatttattccgttcttgcctcctctgagtgcagctaatctaaaggtctactatgccacatgtttcaccctcatagctgggataatggtgtttggtggttttcttgcaccaatcctggaacttaaacttggtgtagggggcacgtcttatgaagacttcatccgcagcgttcatctgccgatgcagttgagccaggtagatcccattgtggcatctttctcaggcggagcagttggagttatctctgccctaatggttgttgagataaacaatgtcaagcagcaggagcttaagcggtgcaaatactgtttaggaaccggatacctggcatgtgcccgctgttcaagtacgggcgctcttgtgctcacagagcctgtttccacattcagtgatggcgatcagcctttatccgcaccaaagacagagagatgcccgaattgctcaggctcgggaaaggtgatgtgcccaacatgcctctgcactgggatggcaatggcaagcgagcatgacccccggatcgacccgtttatttgaggtgcacctttagtccaggaactgctgcaacgtgtggaagatgcttttgtagataacagcatccacaaaagattcacagataggccgaatcgtgaattcgaatcgacgttgtacgacacgaataggacgaactgaagagtgcagagaggtgtatgttgtaaagtaataaaaaaaatatttagaccaaagaccgtttggccccgttttatagaaatcaagctatgtttgattgt

SEQ ID NO: 481 - DNA, 1926 bp, Zea mays
gacgtccgacgagtggcgttgaggacagaagacgacgagtggagtggagtaggacacgaggtggttccggccggcccactcgcagaatcttctgccactgcccttccatctcgtcccttagctacaagtcatctcgccgcaaccggaacccgcagccatggggacggaggcggagcagccggacatggacagccaccgaaacgacggcgtcgtggtggtgccagcgccgcgcccgcgtaaggggctcgcctcctgggcgcttgacctgctcgagtccctcgccgtgcgcctcggccacgacaagaccaagccgctccactggctctccggcaacttcgcccccgtcgtcgaggagaccccgccggccccaaaccttagcgtccgcggacacctcccggagtgcttgaatggagagtttgtcagggttgggcctaatccgaagtttgctcctgttgcggggtatcactggtttgatggagacgggtatgtgcaacttcggaaaaaattcaaagtcttggattttacctatggatttgggacagctaatactgcacttatatatcatcatggtaaactcatggccttgtcagaagcagataagccatactacacatccattgcagcaattatgctgatgcagaacatgtgttccacattttcagatgttgttaaggtccttgaagatggagacttgcagactcttggcttgttggattatgacaaaaggttgaaacattcttttactgcccatccaaaggttgacccttttacagatgaaatgttcacattcggatattcacatgaacctccatactgtacataccgtgtgattaacaaagaaggagctatgcttgatcctgtgccaataacaataccggaatctgtaatgatgcatgattttgccatcacagagaattactctatttttatggacctccctttattgttccgaccaaaggaaatggtgaagaacggtgagtttatctacaagtttgatcctacaaagaaaggtcgttttggtattctcccccgctatgcaaaggatgacaaactcatcagatggtttcaactccctaattgtttcatattccataatgctaatgcttgggaagagggtgatgaagttgttctcattacctgccgccttgagaatccagatttggacaaggtgaatggatatcaaagtgacaagctcgaaaacttcgggaatgagctgtacgagatgagattcaacatgaaaacgggtgctgcttcacaaaagcaattgtctgtttctgctgtggattttcctcgtgttaatgagagctatactggcagaaagcagcggtatgtctactgcactatacttgacagcattgcgaaggtgactggcatcataaagtttgatctgcatgctgaaccggaaagtggtgtgaaagaacttgaagtgggaggaaatgtacaaggcatatatgacctgggacctggtagatttggttcagaggcgatttttgttcccaagcatccaggtgtgtccggagaagaagatgacggctatttgatattctttgtacacgacgagaatacagggaaatctgaagtaaatgttatcgatgcaaagacaatgtctgctgatccagttgcggtggttgagcttcctaatagggttccttatggattccatgccttctttgtaactgaggaccaactggctcgacaggcggaggggcagtgaagatacggcacctgcagattctgcacacgcgggtacatgttggaagttattgcaggacatgtatatgtataggacaagtttattacacatgtattcgaaccacacattacacaagtttattgcaggacgtgtattcgaaccacacattacacatgtatatgtgtaggacaagtttattacagtcctgattgattgcaaattactcagtctgt

SEQ ID NO: 482 - DNA, 1467 bp, Zea mays
agaagcgtctcttcctcctcctcttcttcctcctcatctgcaccaccacagaacacagattcgcgagcccaagaccaagagcaagagaagaagagctcagctgctgctgcggtgctgccggtgccgggcggagtttaacatcgcgccgcagctaactcaacgcagttaagcttctcctactcctagcttagccaatagccatggcgctggctagccaggtcgccgctaaccagccgccgccgccgacgctctcctcccccgcccgccgcctcccaagagccagcagcaacgctctgctgctgctccagccggcggccgcggtcctcggcggccggaccctgaggcttcggcctcccggcgcgcggaggagggccctggacgccgtcgtcgtcgcgcgggcgtcgtctgaggcgaaggcggagaccgccgaggcgggcggcggcggcgggggagcggaggaggagcggccgtacgaggagtacgaggtgacgatcgagaagccgtacgggctcaagttcaccaagggccgcgacggcggcacgtacgtggaggccatccagcccggcgccgccgccgacctgaccggccagttcgaggtgggcgacaaggtgctggccaccagctccgtcttcggggaggagatctggccggcggcggggtacggccagaccatgtactgcatccgccagaggatcggccctctgtacatgaagatggagaggaggtttggtaagtgggacggcgccggcgacctcaccgagaaggagatcatcaggttcgagaggaactccggagtggtcagcggcagggtgcgggagatccagctgcaaaactaccagaggaagatggagcagaagatgcagagggaagaggacctccgcatggggctcaagctgtacaaggacgggaagtacgaggaggcgctggagaagttcgagtcggttctggggtcgaagccggagcccagcgaggccgccatcgccagctacaacgtcgcctgcagctactcgaagctgggccgggtagaggctgcgctttctgcgctggaggatgcgctcaagtcagggtatgaagacttcaaggcagttcgcaccgacccggatctcgcgaacctgaggaagtcggaggagttcgagcccttgctgaagaactacgacgagtcgttcatcaacgagaacgccatcaacgccatcaagtccttgttcggactcggaaacaagtgaggcgattgttagcttagcttgccctcgtacctgaccatttgccgtgcagatacattgtgtgtatgagtactgtccaaatgtaaaggaaaatatgcaattgtgcttgtcagccacatgccaaatatgttaaggatcaagaaggtgaatatgttagcggacaaactcacgagacaagtattgagaactctggattggattcttttttcaggttcaaacagtttaatgacttgtcaagaaaagaaaa

SEQ ID NO: 483 - DNA, 1380 bp, Zea mays
atggccacccaatatgcgcggctctccctgccatgccgcctgccctcgccgctccctccgccggtgccgacgacgacccgccggctgccgcgcgccgcggcggcggcggcgtccacctccccgcggtgcccacgcgtcgggggcgcggcggccacgcgcgcccgcggcccgtgccggcctcgcgcctccgagggcgaagtgcagcagcaggaggcggaagcggaccaggtggtggacagcaacatgctgccctactgcagcatcaaccgcaaggagaagaagagcatcggggagatggagcaggagttcctccaggcgatgcaggcacgcacgcacgcacgcgccttctactacgaaggcaaggcgatcatgtcgaacgaggagttcgacaacctcaaggaggagctcatgtgggaagggagcagcgtcgtgatgctaagcccagatgagcagaagcttttggaagccgccatggcgtatgtctcgggcaaccccatcatgacggatgatgaattcgatcaactaaagctgagactaaagaaagaaggaagcgacattgtacaggaaggtccaagatgcagcctacggagtcgaaaggtctacagtgacttgactgttgactacttgaagatgttgctcctaaatgttcccgcagctgttgtagctctggcactattcttctttttggatgatttcacgggatttgaaatcacatatcttcttgagttgccggagcctttcagtttcatcttcacatggttcgccgcactgcctttaatattttgggtagcgcaggcgatcactaatgtcatagtgaaggacttcctgatcttgaagggtccgtgtccaaactgcgggaatgaaaacctctccttcttcggtaccatactgtcagtgcctagcggtggctcaaaaaacagcgtgaaatgtgcaagttgtggcactgagttggagtacgactcttcaacccgattgatcacactcccagaaccggctgaggctaaataagtgatggcgtggtttcgatttcgctagcaggaaagacggcccggccggcccgcagattcttgatcgacgacagtacgaagcaagactgttcttggatcgggtggcaatcgtggagtgatgtatgtttgctgtgctagtctgtgtgtatatatatttgaacaagtttagacacctgtattatatagatctaatgaaatgggtatatgtatgtgcatagagtgtacaaagaaaaatttaataagccgagttattgtatgttttttctcctcctatatattgctgttacctagtcggctactacaaacaatgagggataaacaagcaaataaacaacgatttctcgatggaaacccacattttttgtgtgtgtgc

SEQ ID NO: 484 - DNA, 1663 bp, Zea mays
gtgtcacgcggcgggcggtccgcctcgccctgctgctaatccagttccctacgcgcgctactgcatacagctatatttctctgatcggagaagaaggcgagcgcgcggtgtccaccactccctcctctcctctcccgtcctatccatccggcacgcccagcatccatccactcctcccctgctccggctccggctccggctccgccatgggcctttcaacagtttactccccggccggaccgcgcctcgtgccggcccctctcggccgctgccgctctgcccagccccgccgcccgcgccgagccccgctcgccaccgtccggtgctccgtcgacgccaccaagcaggcgcaggatggcgtggcgacggcggtcgcgacggaggcgccggcgtcgcggaaggagtgcttcggggtcttctgcaccacctacgacctcaaggcggaggacaagaccaagtcgtggaagaagctagtgaatgttgctgtgtcaggcgcggccgggatgatatcaaatcacctgctgttcaaactcgcttctggtgaggttttcggacaagaccaaccaatagcacttaagctactcggctcagaaagatcgtttcaagccctcgaaggtgtagctatggaactggaggactcgctgtatccactgctgagggaagtcagcattggcatagatccttacgtggtctttcaagatgtagattgggcccttcttattggcgctaagccccgaggtcccggcatggagcgagctgcgctactggatatcaatggccaaatctttgctgaccaggggaaagcacttaatgcggtcgcctcgcggaacgcgaaagtcttagttgtcggaaatccctgtaacactaatgcgctgatttgtttgaaaaatgccccaaacataccggcaaaaaactttcatgcattgacgaggttggatgaaaatagagcaaagtgccagctggcactaaaagcaggtgtattttatgacaaagtatcaaacgtgactatttgggggaaccattcgacgactcaggttcctgatttcttgaatgccaaaattgatggaagaccagtgaaagaagtcattaaggataccaagtggttagaggaagagttcaccctcacagttcaaaagcgtggaggtgtgctcatccaaaaatggggcagatcatcagctgcatcgaccgctgtttcgatagtggatgctattagatccctcgtaactcctaccccagaaggtgactggttttctacaggggtttatacgactggaaatccttatggcatagcagaggatatcgtgttcagcatgccatgcagatcgaagagcgaagctgaattgcttgctgagaagaaatgcgttgcccatcttacaggagaggggaatgcattctgtgatcttccggaagataccatgctaccaggagaagtgtagtttagttacagaagcaacagcagcggaatgcatttgccaatacattagctgagacttgaaacatctgcttgccagatgcagcaactacttttatatatatatgtgtatattcaataattgtgccacacgaatttgactatgatgcaaacctcttacacaggtaagtcttttttttttccgtaaatacgagaaagactgcttcaaattcatgatctggtgattcagtg

SEQ ID NO: 485 - DNA, 2423 bp, Zea mays
attcgagccctgaaatcccaaaagcccaaaccaaatccaagcgcaagagggggcaaagccgcaaagggggaggcaccaggcaccggcagccattacttactggtcctcactcccacaccaaccaaccaacctcctctgcctgccgcttctcctgctgcgggcgggcactgctgcaagtactagaggaggacatccgcttccattactgcgcctgcggaggatcggaggaaccagtagcggaggcttcgattttcggcgggcgcaataaatttcccgcatggctcggagggccgcgtcctcgctcgtctcccgctgcctcctggcgagggcccctgccggcgcgccgcccgctgccccctctgcgccgcgcaggacagtgcctgcagatgggatgcacaggctgttgccaggtgtccttcagaggttcagcactgcagcagcagtagaggagcccatcacgccgtcagtccatgtgaactacacaaagctcctcattaatgggaactttgttgattccgcatccggcaagaccttcccaactctggaccctcgtacaggggaggtgattgctcatgtggctgagggtgacgcagaggacattaaccgtgcagtagctgcggctcgcaaggcttttgatgaagggccatggccgaagatgactgcctatgtaaacactcagcttgagattttagtttctgccgtatcatcgtggcctgaagccatgctcacagatggttggaatctaactttgcaggagaggtcccgtatcctactgcggtttgctgatttgatagagaagcacaatgacgagcttgctgctttggagacatgggacaacgggaagccatatgagcaagcagcccagattgaagtacccatggtggcccgtcttatgcgttactatgctggttgggctgataagatccatgggctcattgtgccggctgatggcccacaccatgtacagatcttgcatgagccaattggtgttgcaggtcagatcatcccatggaactttcctcttctgatgtatgcctggaaagttggccctgctttggcatgtggaaatactctcgtgctcaagactgctgaacaaacccctctatcggctttgtatatctccaaattgttgcatgaggctggactacctgagggtgttgtgaatgtcgtttctggttttggccctactgctgagaatggtctgaaaaactatacctttggactaaacatttatttctttccttcaataaagatcgcatttactggatctaccgatactggaaaaattattctcgagttggctgcaaagagcaaccttaagacagtgacactggagttaggaggcaagtcccctttcatcataatggacgatgctgatgttgaccatgctgttgagcttgcgcactttgccctgttctttaaccagggacaatgctgctgcgctggatctcgcacgtttgtacatgagcgtgtttatgatgagtttgtggagaaggccaaggctcgtgcattgaagcgcgtcgttggtgatccgttcaggaaaggtgttgaacagggcccgcagattgacgacgagcaattcaacaagatcttgcgctacattaggtatggtgttgacggtggagctacccttgtgacgggtggtgataggttgggtgacaagggtttctacatccagccaacgattttctcagatgtccaggacggcatgaagattgctcaggaggagatatttgggcctgtgcagtcgatcctcaagttcaaagacctcaatgaggttatcaagagggcaaacgcgagccagtatggattggccgccggcgtgttcaccaacagcctggacacggccaacaccctgacgcgcgcgctcagggccgggaccgtctgggtgaactgcttcgacgtcttcgatgctgcgattccgtttggtgggtacaagatgagcggcatcgggagggagaagggcgttgacagcctgaagaactacctgcaggtgaaggcggtcgtcaccccaatcaagaacgccgcgtggttgtagacgctgcaagtgtggccttgtgcacgagaaccacgtatattcatttcctggtcacatccccgaacaatgtgaaggcgttaatcagatagatgacgatgaagaagaacaactataataagatttgccctagcctgggttctcagttatctctaataagttttatggttggtgcctatatattgtgcaatttggttgctcccttttattttgtttctttttgataagactgttctagcaacggatatgcagagttcattatgaaaatgcatttgttagtgtctttgatggttaagtccctaattgtcatcagtgttgattccctagatttggcgaagaatgtaagggaagagaaagattagagaaaaaaaatttaaaagggttttac

SEQ ID NO: 486 - DNA, 4130 bp, Zea mays
acatgaggatgagtagagacgaaaggctcggcgctcgcaccaatcatcatacctcctatcgctatccaccactagactctgatatatttcttttctttttaaccttccgctttcactgagagataatcaattatatagtaataattataatactctgatgtattatttattataatagttatagtggtctgtctgctccttctccttgtgagttggtgtgtctccctataaaaataaaccggaaaaaactcaccaaactgaaactagtaggggactaggtctagagaaaggagagacacaatcggccggaagagcgattgatttctcccgccgccgccgccccgtctcttcctcgtccgccgctgcgcccgccgcgcacaagaggagggtttcagtgttagggttctacccccgcctgcgctggtgatctatccccctcactcttccgttccatctcgtcttttttttttctcgtttaactgatgatgagattgctctgccgattgccaatcctcaacgcgcctctgacccaggggacaacgcaaatccttccttcatttccagcttcagtgactactccacctacctgtaccactgttcgtcatcctcggttctactcctaatcattaatttccttccctccgctcgtaatccttcacttccttgccactacctgatttatcccttcactcccgcttccgcacgcctgcctctgcctgtttttgtttgatttagagatccgatcatgcgattggattggattgcttccattccatcttcctcatcgctatttttgggtcaaactttgttgcgtctatccaatgaattccttccttttaagacctggcatgtttgactatcccgtgccaagcaaattaatacacgttattgttctcatattgccgtgtccaccagctgcacaatcaactccctgcccccctatcccctagacccccaccacccaaaaaagaaaaaaaagtcggtttttgccatcgactgcagtcttctacacagagagacccaacccacatgagtaaatgacagacgatgacacatgctcaaccctttttgtttcctcctgcaggtatcagcagccaaatgagaatgcttgctgtgtttgattgatcgtcagatccttacttacaacccaccaggtcttgtggtacctgccacctcaaagtcacgacagatggccgcaaataacaacccttggagggtccctatgccaccgctgctcaatgttcgagctggttttggcgatacaagtctcttctcaacctcactgcctgttcttcctcatgaaaagttgatcttttctcattcttctcatggtaccccatcaaaggatgacgcttcggccaaaatgaaagtgcttgctgatgatcctgatgagaaagactacaagttcgattttgatcttcgacagatagatgacttgttgcctgatgaagatgagtttttcgcggggatcactgatgaaactgagcccatcgggcaaacaaataccacagaggaattggaggagtttgatgtctttggcaatggagggggcatggagctggatattgaccctgtggagaccatcacagttagttttgcaaattcaagtattgtggacggggctagaggcaatggcatcaacccttttggtgtcccaaacactgtaggaactgtggctggggagcacccatttggagagcacccttccaggaccttgttcgtaaggaacatcaatagcaacgtcgaggactctgaactgcgatctttgtttgagcaatatggggatatccgtaccctttacactgcaacaaagcataggggctttgtaatgatatcttatttcgacatcagagctgcacggaatgcaatgcgcgcattgcagaacaaacctctgaggaggagaaagctggacattcatttttccatcccaaaggagaatccatctgacaaagatttaaaccagggaactcttgttatttttaacttggatccatcggtttctaatgaagaggttcgccagatttttggggcatatggggaagtaaaggagataagagagacaccaaacaagaaacatcataagtttatagagttctatgatgtaagagcagcagaggctgctcttcggtcactgaataaaagtgagatagctggaaaacgaatcaagttggaaccaagtcgtcctggtggaacacgcagaaacttgatgcagcagctcggtcacgatttggaccaagaggagcccagaagctacagacatcctcatgttggttcacctattgctaactctcctccaggggcatgggctcactatagtagtccaacagataacaatatgctgcaagctttcactaggtctccaactggaaatggaatgagtcctatcggaatgccttcactgatctcaaatgctccaaagattgctccaattggcaaggatagcaatcggtctaaatatgatcaagtcttctcaaatggtaaccagtcactgggagctgcatttcagcactcccactcatatcaagatcacaacagtgaacagatgagttctagtcctgggactttatcagggccccagtttctctggggaagtccaaagccatattcagaacattcaaaatcccctatttggcgtccaccagcaaacggacctgcattgtcatccagtagtcgcactcagggccaaggattcttgtacagtagccgtcaggcttcattatttggttctttagatcagcaccatcatcatgttggctctgccccttcaggtgctccattcgagaaccattttggctttttatcagaatcgccagagacatcttatatgaagcaactcaagtttgggaacatgggtaatgttggtattggtagaaacgggggaggcctcatgctgggcatggctagtcatgcttctgtgaatcctggttcttctctgattggaagtctgacagataacgtatcttctagcttcagaccgatattgtcaccgagattgggacaggcattttacactaatcctccataccatgggcctggtacattcggacttgacagctccattgaccatgcccgtaaccgcagagttgacagcagtgtgttgcaagctgatagcaagaggcagtatctgcttgacttggagaagattcgcagaggtgatgatactcggacaacattgatgattaagaacatcccgaacaaatatacatctaagatgctcctggctgcaattgatgagcttcacaaaggaatttatgacttcttctacctgccaattgatttcaagaacaaatgcaatgttggatatgcgttcattaacatggtatcaccggtgcacattatatccttctaccaggcttttaatggtaagaaatgggagaagttcaacagtgagaaggtagcatctttggcttatgctagaattcaaggacggtctgcactgatatcacattttcaaaattcaagtttgatgaatgaggataagaggtgccgccccattctttttaatcccaatggtcaggactctgtgaatcaggaagcattcccaattaatggtatatgcatccacatgcccctggaagatgattgccttgacaatgaagaaaacaagagtctgaacgagaagacaggagagaactctactgatatcgctgggagtttgtgactgtcggccatgatagcaaacatgatcagaatggccacatatataaatctaactgtctagagagtatccacctccaaattgtataaaaactgatgaaggttgatggttaggcgttgaattttgtggtctttcggttttagttgcaacagatgtggcccctggaagcggaagcgaaagcgagggagcttcgaaccggagctgggcgcttgcttgtcgaatccccctcactctttacagatgtggggatgagcaaccgctgctgctcatagttgtgcttgcttttggttgcttgctgtaaaaaggtgaactgaactgaagaaatttagccaaactgtacagtttagaacttttgtgcatattttgcattctagtatgttaatgtgtatgggtggagcagtagttcagagatcctttttttctgcgtgagatctttttcttaatgcaatatcggggctgtcatactcaggtc

SEQ ID NO: 487 - DNA, 12296 bp, Zea mays
atgtacctattttttgtgcacaatatggaaagtttctttgttgtagcattagtaaagctcactagttttgtactcatcattaggttctgaaggagagttatgaacgatttatggagttcattaagcgaagcaacgctgttagtccaacagtaactatggaaacagcaactgctctacagctgaagctggagaaggtcacacgtagggctcaggagcagcttcagctggtgttagaagaacaaagcagatttggacttgatattgatctggatgcaccaaaagttaggattcctttgaatgctaatcaacctttgctgggcaatgagtactttgttcttgattttggccattttacattgcatacaagagatggtaagcatgatgaagaaagacagagtctgtattcaggcttttatattactgggagggatatggctgctttccttatttgtgatttagctcagaacatatactcaatacctgaaaatttagatcaagataccctcctaggtcatacctttgatgataatcagttctgttctcttcttgatcgctgtggaatgtcagtgataattgagcagatcaaagttccacatccgaattatccatcaactcgtgttgcttttcaagtacccaatctggacattcacttttcaccaaaaaggtactgcaagatagttgaactgcttggtgtgcttctccatatgaagggaaacaataatgaatattcaaataaccatgaaagtggtagcttggcgccttggtatcctgctgatctagctggcgatgctagaacattggtttggaggggcattggttattcgcaagctgaatggcatacttgctatgttgtattatctgggatgtatctatatattttggagtcagaattctccgcgaattaccaaaggtgttgtagcatggctagtcgccaagtatttgaagtgccaccaactagtgttggtggatctccttacagtattggtgtgtgttctagaggtggagacacgcataaggcactagaactgaccagcacactggtaattgaatttcgtaatgaaatcgagaaggctatgtggatgaaagcacttgtccaggcaacataccgagcttctgctcctcctgacgtgaacatattaggagatcctgttagccctcccccagaatcaagtacaccacggcttaatagcttgggattagtggatcttgttgtgaatggctctgttattgaaactaaactttcactgtatgggaagctggacagaaagagcagtgattcgcaagagcttctaatgctagagctccttgggaatggagggaaggttaatgttgttcaatcttctcgtggtcttagtgtgaaaacaaaattgcattcattgaaaataatggatgagctacaaggtcgtctttcaatgacttcaaagtatttagtgtgctctgtcatcaatgaaagtgttggagctacctcttccgatacacttgataagggcggcgacctaagcatctttcctgtggatgaggatcctttcatggatgcattaacagattttactccagatcaaaattctaatccagatgactgtcaaattcccaacttcatttctgatgcaaatgagtacaatgaaataggttcaaaagatggttcatgctttgatggggatgaacagaacgcaaaacctactgaaatattttatgaggcacaagatagtaatgtggcagattttgttgttctgacattcttgagcaggagtcctgattcttgtctttatgatggtatagattcacagatgagtattcgtatgtccgcactggaattctactgtaacagacccacacttgttgctctaattgagtttggatttgatcttagcacggttaattctgtgccgaaatgtagtcttgatgtggcacctgcaattgaaactgtgaaacccacagggaaggaagaaggtgctcctactattgtaaaaggattgttaggttatgggaaacgtcgaacaattttcaacatcaaaatggatgtggatagggtatcaatgtttctcaataaggaagatggttctcagcttgcaatgtttgtgcaagagaaatttctgtttgatttgaaggttcatccaagttctttttcaattgatggtatgctggggaatatgagattttgtgacatgtcccttggtccagaacatcgttggggttggctttgcgatatacggaagcctggtgtcgagtcactcataaagttcacattccagtcgtacagtatcgatgatgaagattttgaaggtcataattacagcttgactggtcagctttctgctgttcgtattgtctttctctaccgttttatccaagagtttacttcttactttatggagcttggcacccctcatactgaagaggcaattaagtttattgataaagttggaggttttgagtggttaattcagaaatatgaaatggatggagcttctgctataaagctggatctttcccttgagacacccataatcattgttcctaagaattctcagagcgaagattatatacagtttgatcttggtcaattgaaagtaaggaatgagtttagttggcatggaggtaaagagactgacccttctgctgtaaggcttgatgttctccatgcagaaataaatggaatcaacatggcggttggggtaaatggaactctgggaaagtgtatgattcgtgatggtcgcggcatcaatatagaggtgcgacgtagcctacgggatgtcttcaaaaaggtcccgatactgtctatgaaatttcagataggattgcttcatggtgtcatgtcagataaagaatacaatgtcgcgataagctgtatttcgacaaatctgtccgatacacctaaccttcccccaagttttcgtgaaaatatgaacaggacaaaggagtcaattcgtttacttgcagataaagtcaaccttagcaaccatttgttgctttcacgtaccgttgttgtcatgaccgtggaaattcagtatgcgttgcttgaacttcgcaatggcccagatgcagagtcacctctggcagagcttgctgtggaaggtctatgggtatcctatagaacaacttcaatgcttgaaatggatctatatttgtcaatattgaaattttcaatacatgatatccgtccagatacgaagtctgagatgcgtctgatgcttggatcttgttcagagactgctaatctgtgcgttgatgactcttcaactgatgcaggggtttcgaacctcacaatgctgatactggattatcgttcgcgttcttcttttcaatcatttgttataagaatacagcagcctcgtatacttgttgtcctggattttctgcttcctgttgttgagtattttgtgccttctttaggctcgataactggcagagaggaaagcttagacccgaagaatgatcctcttatgagggctgatgatattatacttactgagcatgttttcttgcaaaaagaggattttattcaactatctcctgtaaggcagctaatagttgatggttgtgatattgacgagttcatttatgatggctgtgggggcactgtatccttatgtgaggaatttgataagaaaggacaggtatactctgggattataatcataattggttgtggcaaaagacttcgattcaaaaatgtcaaaattgagaatggtgcactgcttagaagatgtgtatacttgaacatgggaagcagttactcaatttcttctgaagatgatgtagaggtttctgtgttagaaagttctttcacgaatgatgaagactgtttaaaccttgaagaacataaaaagagaaatctgcagaatgccattgatggtcccacaaaccaaatactgaactttacatttgaggctcaggttgtatctccagaatttacattctatgacagttcaaagttatcaatggatgattcgttgcacattgagaagcttcttcgggccaagatggatttcagtttcatgtatgcttcaaaagaaaaagatatatgggctcgatctgtcattaaagaccttacaattgaagctggttctggtcttcttgttcttgaacctgtagatgtttcatggaaatatacttcagtcaatgaaaagacaaacatagtgttggtgtcgacagatgtttgcatccatctttctctgagtgttgcttctcttatgcttaaactgcaaaaccaaactcttgcagcattgcagtttggtaatattagcccactaatttcttgcacaaactttaagcgaatttggagctcaccaaaaggtgacctacctggttacaacctaacgttctggcggccacaagctccctccaattatgtcatattgggtgattgtgtgtcctcaaggtctgtgccaccttctcaggttgtggttgctataagtaatacttatggtcgtgtacgaaaacctcttggatttaggctaattcatgtattacctggttctctggatctcattgattcctgtcaatcaactgaagaaaacgaatgttctatctggattcctgtaccaccacctggatatttagctctaggatgtgtggtaaatattggaaggttaccaccttcaaaccatgtagtgtattgccttcgttctgatcttgcgacttctgcgacattttcagattgtatacacactctctcacctgctgctggaataatctctgaatttagcatctggcgtgtggacaatgtgattgcttcattctgtgcacataattctatagagcaacccactaaaacagaagctcttaatttgcaccatgttctcctccggaatccaaattgctatattgttaaagatctaagtgcagattcatctatccagaatgaccaatcttctgatcaattaaatcaccgcaagagtctttctggatgggatgtacttcgcactttgtcaagaccaagtaactattgtatgtctactccccattttgaaaggatatggtgggataaaggaaacgataccaagaagccattttctatatggagaccgttacctcgttttggttttgcttcggttggtgactgtataactgaagggtttgaaccacccactcttggcattcttttcaagtgtgacacagttgtttctgagaagcctgtacagtttactaaagtgacacaaattgacagaaaaggccttgaggaaatattcttctggtatccagtgccacctcccggttacgcttctcttggatgtatcgtaacaaaaacagatgaaatgccaagcaaggattccatttgctgccctaaactgagtctagtgagccaagcgaatatgtcagaggatcctatctccatgtcttctagctcaaaaggtccttgctgctggagcatctggaaagttgaaaatcagggctgtactttcctggccagaccagatgtcaagaagccctcagctcaactggcataccgtattgctgaccatgcgaagccgaaggcacgtgaaaacattactgctgagctgaagctgggttgtttgtcggttggcattcttgacagctcttgtggaatggtcacaccactttttgacacaacaatcgctaatataaatcttgcaacacatggaagatttgagacattgaatgctgtattgatctgttcaattgctgcatccacattcaatagacacttggaggcatgggaaccctttgttgagccatttgatggaatattcaagtttgaaacatatgataccagtgaacaccctccttccaaagttggtaagaggattcgtgttgctgcaacaagtcctctaaatgctaacctgagctctgcaaatcttgagctgcttatagaaacgttagtttcatggagaagacagattgatcttgaaaataaatcgtcaacaaaaagcgagggtaccattgaaaacatgaaaaaagctgatgattcttcgtactctgcattgaatgaagatgatttccagagagtggtttttgagaataaattaggatgtgatgtttatcttaaaaaaaaaatggaagatagtgaaatcactattgagcttttacagcatgagagcaaagtttcgttgttgcttccgcctcccaggttttcagataaactaaatgtgttatccaattcaacagaatcaagatactatgttgttgtacagatctttgagtctaagggcttgcctatcatagatgacggcaatggtcacagctacttctgtgctttacgcttacttattggaagccatgcttctgatcagcacaaagtgttcccacagagtgccaggacgagatgtgtaaaacctgtggaaactactgagttactgacccactgtgccaagtggaatgaacattttatatttgaagttccagaacaggcatcagctaatttagagattgaagtaacaaatcttgcatcaaaagctgggaaaggtgaagtaattggttctctgtctatgcctattggacgaggagcaaccatgttgaaacgagctccttctatgaggatgattcagcatgtttctgatgtcaaacgggtgctaacatgtcctcttacaaagaagggtcagatacctaattttgaggacaggaaaaaaggtggtgttttagtactctcaagctgttatgtggaacgttctactcattcatatttccagaggttgaaagacagtataaacaatgtggagagcgacttctgtataggacttagcccagatggtccatgggaaagttttactgcagctttgccagtgaccgtccttccaaaatcgcttaataataaccgttttgcatttgaggtcactatgaggaatggaaagaaacatgcaaccttgagaggtcttgcagttattgccaatgatgctgacataaaacttgaagtgtctatatgtcctgtaaacatgcttgataactctatgttaaatactagattggcaagctccaccagtgttattgatgaagtatttgaaaatcagtggtaccgaccaattgcagggtggggacataacccttcaattggtcacagaaaagacttaaagcagtggagcacaaaggactgctcatactcatctaaggcattttttgagcctggccttccatctggttggaggtggacctcaccgtggaaaattgaaaggttgaattttgtagataatgatggatgggcatatgctgcagattttcaaaacttgaattggccatcatcatcctggagatcttctaaatcaccacacgacttcgtgagaagaaggcgttgggtacgttctagacagcagtcgcaagaacaaagtgcagaaattcctagaaaagtacttgctactgtcagtcctcattcatctactgcgttgccttggacatcgatgattagggatatggatttatgcttgcaagttcgcccatattctgaaaaatcagaggaatcatatagctggagccagatttgttcactaggttctgagagtatacctaaacagcagcactcttcactttctaggcaaagcaccgtaaagcagtcagtggtatcatcaaggaattctgttcttaagcttgctgaactcgagaaaaaagatgtgctctcatattgccatcctcctgttagcactgaaagatatttctggtttagtgttggaattgatgcttctgttgttcatacagatttgaatgtacctgtctatgactggagaatttctttcaattcaattcttagacttgaaaataaacttccctatgaagctgagtatgctatatgggagatttccactaaaagtaatatggttgaaaagcagcatggtattgtcccttcgggtggaagtgtatttatctattcagcagatatacggaaaccaatttatcttacattgtttctccaaaacggttggattctagaaaaggatgctgtattgataatggacttgttgtccttggaacatgtttcttcgttctggatggttcagaagcagagccagaggagactacgagttagtgttgagcatgacctaggtgctagtgatgctgcaccaaagacactgagattgtttgtcccttactggataaaaaaccactcgtcaattccattatgttatcgcatagtagaaggggaatccacagaaagcacagaagcagactcacttagcagaccagactcgctaagtagagtgtctaagtcttcaaaattttcccttaaatattcttcaaagtctcttgtcagaagaggaacaatgtcgcacagaaatatgcaagtactggaagatattgaagattgtagcacagactatgtgatgctatcaccacaagattacttgaaccgatctgctggtatgcgctctgagtcaagggataacaatttcagtccagctcgagttgcaatatctatggctgttggtggttgcacacagtacagcgtaggagtatcgctttttgagcttgagaacaaggagcatgttgatatcaaaacatttgcttctgatgggtcatattactggttctcagttcaattgaagatggcttcagataggacaaagaatctacctgtaaagccatctggcccgggagctttatctgaaggcatggatttgatggtgttccaaatttcttcctcgtcaataatccggtctaactcggtaagatcaacagctgatcgatgaaaggattgaagatcaagagtgaagttacgctgtcccgcagatcccaacaaattgctgtaaaaatcccagaccacctcaatcttatccttctgatcagtgaacaccctgtcctctgtcttcttgtccttttgttatcatagtccacttaatatcgattactcgagctcaattttaatacactcttatttggaaatcataggtttggtttttggtaatttgaatcttgatcaacttctgagaggtttaatcatttttttgagctcagacgtgtttcatgatagattctgtgcttaagcatgcctattgtttgtagtaaaactattgcgaacagtttttgactgatgattctggtccttttgttcacatggtccacttaatatccataacacgagctaagttttaatactcttatttgcaaatcaaaggtttgctttttggtaatttgaatcttgatcgatatgttttgttaattttctgtttgcataaggtttatgatgaagtgttgttatatttaactatatacttgaacttttctgaaattgctaacaatgcaggtggtaaatttactgccgagagcacttcttatcaatagaattggaagaactatttttctatctgaatatcatgatgagactgaagagcccttacaaccatatgaacctccaaaagtatttcaatggcgatcagaatttggaagtgaacttttaaagttgaggttggagggataccaatggagtacaccttttagtatcaatgctaatggagttatgtgtgtgctcatgaacagcacaacaggaaatgatcaggcttttgtcagggtaaatgtgagaagtggaacaaaaagttcacggcatgaagttgtatttcagcttgattgctggtccagcccatacagggtggagaatcgctccatgttcttgcctatacggtttcggcagtttggtggtgatgatcattcatggcgtaatctgcttccgaattcatcagcttccttctttttggaggacctgagcagaaggcatctattggaagttttggttgatggaactgaccctatgaactccatgacatatgacatcaatgtcgtaatggatcatcagccccttactaattcagatgcccttaagaaggccttacgtgtcactgtcttgaaggaggggaaattgaatgttattcaaattattgattggctgccagataatagaaatcgaggacagataactgaaaggatgttatcaccaatctttcagccatcagaggtcgactatgggcagtcatctcctgatctggatagtgaatttcatgttactttggaactaacggagcttggcatttctgtaattgaccatatgcctgaggaagttctttacctctcagtgcagcaactgttacttgcatactcatctggaattggctctggagtaaatcggctcaaaatgcggatgcattggattcaagttgataatcaattaccatttgttcctatgcctgtacttttctgtcctcaaaagattgaaaatcagtcagactatattttcaagttctctatgacagttcagaccaacaattctcttgatttttgtgtctatccttatgtcggtgtccaggttcctgagaattgtgtgttctttgttaacatccatgaaccaatcatttggcgcctccatgagatgattcaacacctaaaattcgataggatatatagcaatcaaccttcagctgtttcagtggaccccatactgaaaattgggcttctgaacatctccgagatccgatttagagtgtcaatggcaatgtccccaagccaaaggccaaggggagtatttgggttctggtcgtcgttgatgactgcattgggaaacatggagcatatgccggtccgtatagctcaaagataccgggaggaattgtgcatgcggcaaagtgcacttatgaactctgctatatctaacattcaaaaggatcttcttagccaacctcttcagctactttccggtgttgatattcttggtaatgcgagtagcgctctgagtaacatgagcaaggggatagctgcattgtctatggacaagaaattcattcagggccggatgagacaggatagcaaaggtgtggaagactttggggatgtcataagagatggaggtggtgctcttgcaaaaggcatcttcagaggtgtcacaggcatattgacaaagcccatcgagggtgcaaaatcttctggtgttgaaggttttgtgcaaggagttggaaagggtataattggcgcagctgcacaaccagttagcggagttcttgatcttttatcaaaaactactgaaggtgccaatgcggtaaaaatgaaaatatcatcagcgataatggctgaggagcagttgctgcgtaggcgtcttcctcgagctattggtgggaatagtttgctctatccttatgacggacacaaagctactggccaggctatcttgcatctagctgaatgtgctacattccttggtcaaattgatatttttaaaatccgaggaaagtttgcttctaccgatgcttatgaggatcattttttacttcctaaggggaagatttttttaatcactcacagaagagtactattgcttcagttaccaatgatgacccagcgtaagttcaatcctacgaaggatccttgttcagtaatatgggatgtattatgggatgatttggtaacagtggagatgacccatgggaaaaaagatcctccagattcctggccttctaagcttattttatacttgaaagctaaaccttcaaattcgaaggaaattgttcgtttggtcaagtgtaatcgaggttcagatcaagcatctatcatttactcggcaattgacaaagcttataaagcttacggtccaaactcgttgaaggaattcttgagatggaaggtaccaaggccatatgcccctcgcaatagtagtggccgaagtatccaagacttatcatttggttaaaaggtcaacacaaatgcacactttagtgttaaacacagtagaatcttaggatgaaggtattttaggttgacacttttggttaccaggcaaatgatatattctacatatacactataggtatcagaggataggtactttgccttcatgtaaatagatatattttaggaggcgccggtattcatgtaaatgtgaacatctctgttataaagaaaaaaaataataatgcaaattatgcaagattcattgctgctgtcttgttgcaatgtttaatgtgttctcttgcgattgtctaaagacccaaaccgttaacgtgtctttactactatggtttcatttcacagatctctatgatcataccttgctcattaaaagcatttactattcttgtgatggggagatccatgtccgagttttggccaaaccactacagatctggtttccttcggcatatacaatcacattcaatatggattttttgacggaccggttcttcgcgaagagtttatcacttcactactacaccgtgtctcttatagatgtatttatgatcggtttcaggattatgtcatgcagtttattaattgtttttcatttttagaaaactaaactagtgtctcagggttgtacatggcttaagtccctttgaatataataatagtatgcgacaatgcaaagttgg

SEQ ID NO: 488 - DNA, 1608 bp, Zea mays
tagccgccctcctcccggccgatcccttcgtcctcaatctcaatcccacaccaccaccaccacctcctccggtccccaacccctgtcgcaccgcagccgccggccatggcctgcctcaccgacctcgtcaacctcaacctctcggacaacaccgagaagatcatcgcggaatacatatggatcggtggatctggcatggatctcaggagcaaagcaaggaccctctccggcccggtgaccgatcccagcaagctgcccaagtggaactacgacggctccagcacgggccaggcccccggcgaggacagcgagcaaacatgggaacgatccttatctcttgggcatgtggcaccctgcagcccgcaggccatcttcaaggacccattcaggaggggcaacaacatccttgtgatgtgcgattgctacaccccagccggcgagccaatccccaccaacaagaggtacaacgccgccaagatcttcagcagccctgaggtcgccgccgaggagccgtggtatggtattgagcaggagtacaccctcctccagaaggacaccaactggccccttgggtggcccatcggtggcttccccggccctcagggtccttactactgtggaatcggcgccgaaaagtcgttcggccgcgacatcgtggacgcccactacaaggcctgcttgtatgcgggcatcaacatcagtggcatcaacggggaggtgatgccagggcagtgggagttccaagtcgggccttccgtgggtatttcttcaggcgaccaggtctgggtcgctcgctacattcttgagaggatcacggagatcgccggtgtggtggtgacgttcgacccgaagccgatcccgggcgactggaacggcgccggcgcgcacaccaactacagcacggagtcgatgaggaaggagggcgggtacgaggtgatcaaggcggccatcgagaagctgaagctgcggcacagggagcacatcgcggcctacggcgagggcaacgagcgccggctcaccggcaggcacgagaccgccgacatcaacacgttcagctggggcgtggccaaccgcggcgcgtcggtgcgcgtgggccgggagacggagcagaacggcaagggctacttcgaggaccgccgcccggcgtccaacatggacccctacgtggtcacctccatgatcgccgagaccaccatcatctggaagccctgagcgccgcggccgttgcgttgcagggtccccgaagcgattgcaaagccattgttccttccgttccgtttgcttattattgttattatctagctagatcatctgggggtcaggtcgtcgtggtgtgccaaaacagaacacagaaagaggaagaagaaaaaaaaaacaagacgtgtggcgtttatgttatatcatccaataatggccgtaccacacttgtggtacctttcagtacgtatgcttgcattgtatgaggggtcgctttcctacgccctaccatgtctgtggctttccttgcttggtgatgcgatatggagggaatcgttcgtcagtgccagtgggcggcagcattattgtcatcgtcgcccgattggatgaataaactattattagcctgtt

SEQ ID NO: 489 - DNA, 2117 bp, Zea mays
gctcgagaatttttaggaaagcgtttcatctgcgagagtttcatttgggggctctaaaatagcctcaccctcctcgtgccttatcttcatctcacctgctctttctcctccgtgctgatcggcagtctctaagctttgcaacaactgatagccgaattccgcgcgccggtccctaaaaaaatgcaagtactaggaagtagataagatgcatttccctgtaatttttcgttattatatatactcagcacgggaaggaggggagacactctgttcaaccaccagccgagttcgcagcggcactccagggtccaggcccagcagcctcttcggctcttcgttgggggtgcgtggacaccggaaattgcctcggggattgcgttcctgatctaagcccggcatgaagggctgctcagagcgtttgctgctcctgctgctgctggcatcgtcgttgttactgtccgtcgtggttgccgcgcagcagacttgccctgccgacctcgacagcaaatgcgacggtggcgcgcctgatgactgggagggggaattcttccccggcgtcccgaaaatcaagtatgagggtccaacaagcaagaaccctcttgcttataagtggtataacaaggaggaagtcattctcggaaagaagatgaagttttcactgtaccccctcttttacactgtaaaggactggatgcgcttcagtgttgcgttctggcacacgttccgtggtactggtgctgatccttttggtgcgcctacaaaggtttggccttgggaggacggcacaaattcgttggccatggctaagagaagaatgagagctcactttgagttcatggagaagctgggggttgacaaatggtgcttccatgatagggatattgcccctgatgggaaaactctcgaagaaacaaatgctaacttggatgagatagttgagctggcaaagcagctccagggtgagaccaatataaagccattgtggggtactgcacagctctttatgcatcctcgttacatgcacggagctgctactagcccagaggttaaagtatatgcatatgcggctgcacaagttaagaaagctttggaggtcactcactacctaggtggtgaaaactatgtgttttggggtggaagagagggttaccaaactcttctgaacactgatcttaagagagaacttgaccatttggctaactttcttcaagctgctgttgactacaagaagaagattggattcaacggaacactgttgatagagcctaaaccacaggaacctacaaaacaccagtatgactgggatgttgcaactacgtttgcttttctacagaagtatggtcttaccggagagttcaagattaatgttgagtgcaaccatgctactctatctggacatagctgccatcatgaactggagactgcacgcattaatgggctgcttgggaacattgatgcaaacactggtgatcctcaagttggctgggacacggatcagttcatgacagacattgcagaggctactttggttatgtcaactgtggttaagaatggtggacttgcacctggtggcttcaactttgacgccaaattgcggagggaaagcactgatgttgaggacttgtttcttgctcatatctccggaatggacaccctggcccgtggcctccgcaacgccgccaagctgatcgaggatggttccctagatgctctcgtccgcaagcggtaccagagctttgatagtgagattggtgccttgatcgaggctgggaaaggagactttgaggcgctagagaagaaggtccttgagtggggtgagcccactgttccgtccggcaaacaggaactggcggagattctgttccactctgctctatagatggcgccatgtccgtagcggtagctcctggaataagcaagcactgagcctgcgccctcccaacgcgcgcggtcgtcctcaccagtcaccaccaagggaatgtttctggttgcgcgcgatgaaccatgtacaatacaccgtggaactgaaataaattgaaatagctagtcagaatttttagaactgttgcctctttgtttggaacggaatgaaactgaacttggttagtttgagctta

SEQ ID NO: 490 - DNA, 1679 bp, Zea mays
gaggagatgttgcatatttttcccaaactcctcaagcaatttccatttccaccacgaccactctcttcctcgcagcgcgtaccaacccgccgccgtctactgccactccgcctgctcatggcctcccctacgcaaggtgatgcccccctcgcggctccggctccggcggctgacgctacggacgcggccttcgccgccgcggccgcggtgccggatccaggcgcagagttcgggttccagcgtccggagctcgggaaggagaagctggtcgggacggtggggttccacgagcgccatgtgttcctctgttacaagggcccggatttgtggccgtcccacctcgaggcctctgagtctgaccgcctcccccgcctcctcgccgccgccatcaaggcccgaaagcccaatctgaagaagaccatcaaattgaccatctgtgaaggagaagatggcactgaatcatcaaatggagatgtgttgatctttccagatatgatcagatataaagggctgacccattttgacgtggacaactttgttgaagaagtgcttgtgaaggatattgactggcttcctagatctcctgagcctatgagtggttcctatatttttgtttgctcccatggaagcagggacaaaaggtgtggtgtttgtggacctgctttgattaaaaggttcaaggaagagataaatgaactgggacttgatgatcaggtggctgtcagtgcatgctcacacgtgggaggtcataagtatgcaggaaacgtcatcattttcagttctgatgccaagggagaagtgactggtcattggtatggttatgttgttcctgatgatgtgcctgttttgctgcataaacatattggacaaggagaagttgtggaccatctatggaggggacagatgggtttatctgtggagcagcagaagcgagctctcgagcttcggaacatggtaaatggtggcgaagaatcccttgaagaaaccagaacagatggtgcttctttcaaccctgcagcagctggtggatgctgccaaggcaatggtggcttcacctgctgccaaactgacctgccaaaggaaaaacaagacaagagcatcatagctgagcagaaccccaagagctctgacaaggagggtggtgctggcagcaagaagggggatacaaagacttgcccagtgcccatctggtttgagacctgggagagagctgacacatatgccgctcttgctgttgttgcagctgccgcagcggtgcttgtctccttcagaatctacaagaacctcaactgaagaacatgggagatcctggaagaggtgaccaaaacaagtataggtgaaacagcgtactgtgataaaagtctgggatgagaataaatttacctgtgcataatgctaggcttaggctatggctagcaaatcgttgtgcaaaatattgttgtgcattgtttacaaagtgatgtttgaaatagaagataacggcgatgaacaagccgttggagataaccttagaacctcaaagtagcttatctggagatggagacggtgttgaaaagatgttgctgccagtgttctcgtatgtgaactccttgtgaacctccactccactgcaatcgaagtttcgatgccttagctgctgtttatcataagcaaggcgatgggatcggcatcaccactaa

SEQ ID NO: 491 - DNA, 12890 bp, Zea mays
atggatatcaagagcatgggagaaaccatcgattcaactgaaggaacgttgaagattccagaggatcaagttttagtagaagcaccctctgatgtccaacttcctccagaacataatctaaatggtgaagcatcttctttgaatggccatacagacaaagaagagaaggtttcagtcgagcagccacatgacaatgatcaggaagaagcagaactagatcagaacaacagaatcaacaaagaagatgcggctgatggtttaagtcatggagagagcacaacagaagacagctgccttctgaagcacaagaaagatgaagaatccaagggtgatgaacaacaagatttaggtgttacagtggatgatgacttggtgcaggaagacacgctgaaaactgacaatgctattgagcaaacagatgatggtcagcaagaccaggatcaagaacctgaaaaggcaaacgagaacacagaacctgcaagcatcgcaaacaatgacgatgttgagattgtagctgagacacctactggactccaagctcctgtggagtcacgtatgaatgattctgatggcattccggagactattgatgaagagacagaaacagatgaaccagctcaggcagatggcgttgttcatcctgaagacgtggccaaagtagaagatcaacagagtcaacaagatgacacggtggatgcagatgtggccccagaagaggttaaatgtgaagaaactgatcagcaggaagagaagcccaaatctgaagctcatgagccaacgattgatactcgagaagcgttgaatcaagaacctgctgaagaaactgatgactcgatgaataaaaagattgaagaaactgcacaccagaggaacatggcagctccaaaggagacaacactagaacatgaagcaacaatgagtgctacaccagtaaatacacaagtgcaggaccaggaaccattagaagaaatagaagataccgaaaaaggaatccaaccaagcagtggttctggggatgcaattccagaagatcaatctaatttaagtgttactatagacaatgacactgtgaatgaggatacagtgataggtattgagcaacaggatgatggtcagcaagatgaggatctagaaccagaaaaggcaactgaggatacacaacctgcaagcatgacaaacattccccaggttgaggttgtaactgaagcatcttctggagtccaaactcctggggacctgaatctcaacaactctgatgctgttccagatactattgatgcaaacacagaaacagatgagccatctaaagcacactctgttgttcatcctgaaaagaaagagagatttctagaagacgcaaccactgaggaacctacagaagaggtggtcaaagtagaagctcaacagagccagcaagcagatgtgatggatgcaaacatggtgcaggaagaggtgcctaaatctgaacatgctgatgagccagcaactgatgcttttgaagtgctgaatcaagaatctgttgatgagccagcaattcaagcacctgtaactattcaagtgcagaaccaggaaccattagaagaaatagaacttgctgaagcagttgatactgaagcaacagtgcaacaaagcagtgctgcttttgaggagtcggttccagaacatcaatgtaatttaggtgctacacataacacagagcaggaagacacgctggaagctagtgggcaatcaaaaggaggtcaggaataccaagacctaggaccagaaaatgcaactgaaaacacacaacaagcaagcatgacaaatattcttgatgttgaggttataactgaaacaccctctggaattcaaactcccatggagatcaatctggttatctctgatgccattccagatgcaactgatggaaacacagaaacagatgaaccagctaaagcacacactttcgttcatcctgaaaagaatgaagtctttccagaaaatacatttaccaccaaacctacagcagaggtagtcaaagtagaagatcagcagaaccagcaagatgatgcaatggatgcagaagtggtgctggaagaggtgcctaaatctgaacgtgctgatgagccagcaactgatgctcttgaagtgctggaatctgttgaagaaactgatgacccaatgaatgaaaagactgaagaaacaacccaacagagcaacataccagcatctgaggagacaacggcagaatatgacgcgacaagggagccacctgcaaataatcaagtgcagaacaaggaaccagtagatgaaagagaatctactgtagaagaaagagaagttgctgaagcagttgatactgaagcaccagtgcaacaaagcagtgttgcttttgatgaggcagttccagaagagcaccataatttaggtgttgcaaataacacagtgcaagaagacacaatggaagccactggacaaacacaagaaggtcagcaataccaagatctaggaccagaaaatgcagctgagaacacacaacctgcaagcacggaaaacattcctgatgttgaggttataaccaaagcaccttctgaaattcaaagtcctgtggagatcaatctggacatctctgatgccattccagatactaacgatggaaacacagaaacagatgagccagctaaagcaaacactgtcgctcgtcctgatacggaagagagctttgcagaagatacatctactggacctacagaagaggtggtcacactagaagatcaacagagccaacaagttgatgcaaaggatgcagacgtggtgcaggaagaggtgcctacatcggagcacaccgatgagccagcaaccgatgctgttgaagcgctgaatcaagaatctgatgaagaaacagatggcccagtatatgaaaatactgaagaaacaacacaccagagcaacatgcccgcatctgaggagacactaccagaaaatgatgtgacaacaagggagccatctgtaactattcaagcacagaaccaggaatcattagaagaaagagaagttcatgaagcagttgatactgaagcaacagttcaaccaagcagtgcttcttttgaggagtcagttccagaacatcaacataacttaggtgcgacaaatgacacagtgcagcaagacacactggaagcaactaagcaaacaaaaggaggtcagcaataccaggatctaggaccagaaaatgcaactgagaacacacaacctgcaagcatggcaaacattcctgatgttgatgttataaccaaagcatcttctggaattcaaactcctgttgagatcaaccgggacatctctgatgccattccagatgctactgatggaagcacagaaacaactgaaccagctaaagcgcacagtatcattcatcctgaaaagaaagagagctttcaagaagatacatctaccgcagaacctacagaagaggtgatcaaagtagaagatagacagagccagcaagctgaagcaatggatgcagacgtggtgcaggaagatgtgcctaaatctgaacatgctgatgagccaacagctgatgctcttgaagtgctgaatcaagaatctattgaagaaaccaatagcccagtgaatgaagagactgaagaagcaaccaaccagagcaacatgccagcatctgaggagacaataccaaaatatgacgcggcaacaagggatcaacctgtaaatattcaagcgcagaaccaggaaccagtagatgaaggagaagctactgtagaagaaagagaagtggctgaagcagttcatactgaagcaccagtgcaacaaagcagtgttgcttttgaggaggcagttccagaagaccaacataatttaggtgttgcaaataatacagtgcaagaagacatgatggaagctactgggcaaacaaaagaaggtcagcgataccaagatctaggaccagaaaatgcaatagagaacacacaacctgcaagcacggcaaacattcctgaggttgaggttataaccgaagcaccttctggatttcaaactcctgtggagatcaatctggacatctctgatgccattgcagatactactgatggaaacacaggaacagatgaactagttaaagcagaaggtgttatccatcctgaaaacaaagagagttttctagaagatacatctaccacagaacctttagaagaggtggccaatgtagaagatcagcacaaccagcaagctgatgcaatggatgcagacgtggtgcaagaagaggtgcctaaatctaaagccgatgagccagcaactgatacccttgaagtgctcaatcaagaatatgctgaagaaaccagtggcccagcgaatgaaaagattgaagaaacagccaaccagagcaacatgctaacatctgaggagacagtaccagagtatgacacagcaacaagggatccacctgtaaatattcaagcacagaaccaggaatcattagaagaaagagaagctactgtagcagaaaatgaagttgctgaagcagttgatactgaagcaccagtgcaacaaagcagtgttgctcttgaggacgcagttccagaagatcaacataacttaggtgctacaaataacacagcgcaggaagacacgcaggacgctattgggcaaacaaaagaaggtcagcaattccatgatctaggaccagaaaatgcaactgagaacacacaacctgcaagcatggccaacattgctgatgttgatgtaacaaccgaagcaccttctggaattcaaactcctgtggagatcaatctggacatctctgatgccattcctgatactactgatggaaacacagaaacagataaactagttaaaacagaaggtgttatccatcctgaaaagaaagagagttttcctgaagatacatctaccgcagaacctacagaagaggtggccaatgtagaagatcagcaaagccagagagctgatgcaatggatgcagacgtggtggatgaagaggtgcctaaatctgaacatgctgatgagccagcaactgatgctcttgaagtgctgaatcaagattatgctgaagaaaccaatgacccagtgaatgaaaagactgaagaaacaggcaaccagagcaacatgccaccatctgaggagacaacaccagaatatgacacgacaacaagggagccacctgtaaatattcaagcacagaaccaggaatcattagaagaaagagaagctactgtagaagaaagtgaagttgccgaagcagttgatactgaagcaccagtgcaacaaagcagtgttgctcttgaggatgcagttccagaagatcaatataacttaattgctacaaataacacagtacaggaagacacacaagaagctattggacaaacaaaagaaggtcaacaataccatgatctaggaccagaaaatgcaactgagaacacagaacctgcaagcacggccaacactcctgatgttgatgtaataaccgaagcaccttctggaattcaaacttctattgagatcaatctggacatctccgatgccattccagatactaccgatggaaatgcaaaaacagatgaactagttaaagtagatggtgttatccttcctgaccacaaagagagcttttctgaagacacatgtgttgtagaacctacagaagagatgatagaagtagatcaacttggtcaacaagctgatgcgatacatgcagaggtattgcaggaagaggtgcctgagatgatagaagtagatcaacttggtcaacaagctgatgtgatacatgcagaggtattgcaggaagaggtgcataaatctgaacagtctgatgagccaggggtcgatgctcaagaagtgctgaaccaagaatctgctgaagaaactgatggcctggtgaatgtaaagactgatgaaactgagcacaagagcaacatggtggtccctgatgacacaattccagaacatgatgcacaaacgagagagccacctgtaaatattcaagaacaaagccgggaatcagtaggagatgctgaagcagtcaatactgaagcagaaatgcaacaaaacagtgttgcttttgaggagacaactccagaaaaccatgtagcaacctcagagccatgttctgaaatccaacatgcacatcatgtggaaccagaggaaatcaatggccctgaagatggcaaagatgatgagatcaccaacatgagcagcagagaatatctagttcgagataatgttctgcagagtggaccaataatagatatacaaccagttcaggagttggaacaaattaaaacggatgaagcttctaaccagactcatgctgttatcttcaatgacctagctcaggaagatgctacagcaacaagtgaaccacaagtgactgaaacagaactaaaggacattgaagccactgaagctgaagaaatcaccaaacttgaccatgttactcattccaaggaacttgcagtagaaaatgattcaacagcagatgaaccacataagggtgaaatccatcaaactcttgaacaagatttagttgaagttaaggacactggaacttaccatgaaaaaacaatatctacttcagaggacacagtacaagataatttgacagaagatgagccaagttttggtagtcaagaagtagatgatgcagagtcaacagaagaaactaagcaaaacatagctgagaatattgcagaagtctctgatgtggcgattgttgatgacgcaattgaacagaatgtgctacagactgaggatatcgttgaaatgcataaacaggagctggaacgagaagaaacagagagaatagaacctgttgaatcagaggaagcttctgatcagaggaatgatgcaccattcgattattcagctcgagaagataatacaaaggaaagtgagatacagcagacagaatcagcaacggaaacaaatgaaattgaacccactgaaattgaagcagttcctcgagaaagcaatacctgtgtttcagaggagccttctcaagaagatcatataaaagaaagtgaaacaagttttgacaatcaagaagtgaacatcacagaatcttcagaagtaaatgatagtcacaaagatataatatctggaggaatctctgacccaagcaacacagcttctgctggggattcatctgaaggaagcaatgtccctgaaggcgagccacctgaacaggctgtgcaggaactgggatcagaggagataaagaacactcaaattgatgaagtgaatgaaacatcccttgaaatgaatgctactgtctttcagataccaagtcaagaagaaaatccagacacaaccaaattgcatgaatcaacagaggtgagcaacattgaagccacagaaatgcacggaaacccccaccaaagtgatctggctgctcagtcagaggagcaaacaacagaaggaatatcaagtggtctgaaaccagaatcaattgaaggtaatgatacagaagccaaaaaatgtcaaagtacctctcaggaaaaaacaatctctgcctctgagtctgtcccagaagatgcaaccactgaaccagatgttgatcaccaacaacttcaggatcaagaatctgccaaactcaaggaaaccgaagctgataaatttcaagaaattgtctcatctaacactctttcttctgaggagttcacatcaacagaaccaagttctgacaccgaagcagacaattcacagttagcagaagaaactgaggacaccgaaattgtgaaaagtaatactgctcttgctgaggcagcagctccagaaacagatgcaactgctgatacatcatctttccatgagacagatctagaagagaacaaggacacaggaacaattgaaacagaggatggtatggtatcaagtgactatacatcagaaaagatggacacggaaaccatggagactgaagcagtccctcatgatagtagtgatgcaaatataaaagaacacactgaagacgatacttcaacaccaaatgccccacatgctggtactgaacctgttcatgagctagaatcagttgaagtcagcgctgacacaacggaacatccaggagagacccatgactctgcttctgatgagcttactccaacagaagaaaatacagcagtaacagaaccatcttttagtacacaggaagtgcagaatctgacatctcaagaaatcaaggacagcgaagatgacaaaactgatgaattctcagatatcaatagctttcctattcctggagaggcagaccaagtaccaagaagtgaaacaactcctgatgtccaagaagtggaagaactgggtttaacagaagaaacaagagacattgaagccatagagcctggagatcagcaagaagacatagtttctacccttgagaagccagaaatagacggtgaaccaagtgctgataatcagcaggttcatgaggacaaactaccagaagtggaagacaataaagcaattgaagctgaagcctccaagcaaagtaatattgccactcctgataatgcagctgaagaaaggaatgaactggaaagtgatccagatccatatgcccagccagcagaacaggtagaattatccaaagacaatgagaacagccagcttgtgaagacagaagaaacctcagaccaaagcaattttgtcgtccttagaaggactacagaagattctgttgcaagagaaattgacccacctgttgccattaaacaagagcaaccagtggaagaaatcaagggtgtcgatgccactgaagctgaagaagactttcgtacaacccaagctgttgcaatagagaaactagcttcagtcaataaaatagcaacagtagaaccgacttatgatattcagcgaatggatgacttggaagcaacagaggaaaagaagcacgctgaagccattaatgaaggagatcaatccaatattgctgtttcagaggaacaaactccaacatataatggagaaacaccagaagatcatcatgtagaatcaaatgaaggaacgatggggaatgaaactgacaatatcattttggcacacggaatcaaagatgaaatacagaagtcagcagaactaaaggtatatgtattctgtacaacctcccttagcaaaaatgctagatcaatacaagatgtagtagaggcttcaaacagtatccatcaagtcaaagaagagccagatgctggaaccgaacataattcaagccaaatgataagtgaatgtagtggagagaacgaaactcatgtccaagatagagatgtagacatgtggattctcacagaaggtgtcattgcagaagcatcacaggctttattggaaaatgatcctcaggcagcacaagatactatagaaaaggatgatacaacgaaaagtagtgagccaatcagtgatcacgatagcaggcaacattgtgatgtagaagcacttcaacaacaaagttgtgagacagaggccttatccattttggaacaagatgaggctctgcaaaagattgactcagatcaaaagcagaaagaagttgaggagattgaaagtcagaatgatgaacttcaggtagatgaacagaaacatgaagacaagagggatgatttagccaaagaaccactagtggagtaccagaatttcgaaaacagagcttcaaacaacacaaaagacaatgatgcattcaaggttgaacaaacagaggcagccaatagtgagattctcaagaataaagccctacatatatccaaggaatccaccccaagcattatggctatgaaggttgaaaacattaaggaaacaagtgaaggaactgaagaagatgatgctgccaaaaatgataacaaagatgaacaggagaatgcagaaaatgttgatatagtatcaaaaacttctactaatgaacaaggccaaacaactgatgaaattagaaaagaagaggatcctgttcacatcattcaagcatcagagaaagagatcgcagatgaaatagaagaaagtaaagaaatacatgaagacaatgctatttgtcatgataaattacagacaaattctgaaaaggaagagtcacctcaaccgcattccaatgaaccatacaatgtggatgctaaaattgatgatacaacatctctatgcgaagaaataatccatgacaatacaagtataaatcctagagaaattgaagagataggagaaaacaaaggaccagacttcacttctgaaccttctgtagaatcatccatacagaacaatgttgaagactcaagcagtcatcacaaggttgaagatgaaaagctttcaatgtctgagaaaaatgatgtagatactgaagctatgcaagaaataaatgatgaatctggcgcggatataaaccaaacagaacaatgtcaagaagaaattactgcagatgatgttctgcaacttgaaacagaaggaaattcatttgacaagattgaagagactgcttcaaatgaggaaacagagactagtacagcagccactgaagcagtaacgttcaatgaagatattactgacaaggttagcggagctgatggagcaccgtctaacggaagtctcaagacctttactgacactggaagggatattgatgttccattggtaattacaacatcaaaggaagaaagtgtgaacgacactatggaaaacctcaatcttgaccttcctggacatcaggcacaggatggcaacaccgctgaaaaggtgctcagcttagaggaaagagaaagagagatgccttcatcagagaagctccttcaaactgaaccaggagagaatcaaattcccaatgaacaggatgaaaaggacatacgagatgagaatcaaactctaaaagaaaaggatgaagatgacatgcaagatacagaatttggagaggctaagaaagaagttcaacaagaattacctgtctcccattttctgatgaatctaatattgggaaaagagagcagtgatgcaaatgaagattcagaatctgaggctgcaaggaagcaaggtgaagcgacagaagatgacagctgcacgttcatttctgaacaagaagaaagtctggggtcacttcctacagaaaataaggtggatgacaatcccacctttgttgaacaagaaaaacatgaagttaaatgctctgaagaaacacaggaaatggtcgaagaacaaagtgatgatcagctgcacacagaaagatcaattgaaattgatgaggatatcaaaaagaacactcgtgctttagaaataccagcataccaagacaatccccaggatggaatttctggtgaattgcagacagaagaagcagctggtgtttctacaaaaatggtaactagagatattgatatttcgagtgttgtgctggacaacagaacagttggtactgtgtgtcaggaaaaaatggaggtatcaacaaaaaatgaaaatggaagcttgaggagcagcctgaatgactcaacaaacacaatggctccccaagacgatactctaggagaaggacaatcaaggctcgtgcttgaacctttacctgaagacaaaagtgttgatgtagtttctgagcaagcacctttgttgacagaatcaggaatgactgacgcgaatgacttatctagcgatactacaagtgctcaaaaccctgtgtctacaaaacccactgaatctgccagagttgaggccacatattctactgatattcaactggagaatgaagaagtagataagaaagaagaggaccagcatgcaaacacaaccaaagatgaagtttctaaagagattgtagaaagttcacatataaatctgcagaaaataacaaggcctgaagaaaaatctaatgagctagaaactcaaattaccgaaccagtttgtgacagtcaggcaattttggcccatgaaaaggaaatatctgaagaaaactttccaacagcagtcgaaattcaggctgatggtccaaacatgcagatcaaccaagataagcaagatgaagctgctgacatcgaaactgaaatgaagccagaaaaattaggggaatctaattttcaggaacaccaggacaatggtactgagcaaaagtctcctaaagagactgatgaaggagaccagcaacttgtggccaagaaagagattctgacccaagaaatggatgtgcatgagacagttgaaagacctcagcaagcagttgaaagtcctcagcaaacagtgagcataacatccaatgaagaccaggaactgtttgattcaaaggtccaggaacgtgatctcaatgtagtttcacccagagaagcttctgaggctgaagaaaactttgtggacgtaaccaagccagaattcagcacagatgaagaacaaagtccaaaggctgatgcagaagagaagatttatgacgagaagataaaggacatagagggaactaagaatttaactgatgaagcagcaataaaaactgaagcaccaggagcagcccagaagacacgtaaaaaatatagcctattgtctggcgtgggatcgaaggtaaaacaccaactcgcaaaagtgaagaaagccattgtaggcaaacctgggcacacaaaaccagtatctccgacggcataaaactccagtcaccttagaacatgtacattattgtattgtttgtagtcttgtgagccatttatttcggtggtagtgtttgcgatgggctaggagaaggtcctcttcacaaccatagcattggaattctatgatgttgcacatgaaacacccccccccccctcgagagtatgttgaagatgtttgtaaatatgtctagtgtgtaaattcaagtttccctgaaactttgaggtagaatcaaggacatgtaattggtcaattgtttgtattcttcgttgaaatgcacaagcagtttgtgg

SEQ ID NO: 492 - DNA, 1258 bp, Zea mays
gtcgctagcagccatggcatcatcgagtgctgctctcgccgtcctgatgctcagctgggcggcggctctcgcggccgcgtcgtcgccggtgacgttgttcgaagccggctacatgccgctgttcggcggcggcaacctagtaccgtcgcccggcggccgctccgtccgcctcaaacttgaccgccacaccggctccgggttcgtgtcccgatcgtcttaccaccatggattcttcagcgcttccatcaagctgcccgaccatcacaccgccggtgtcgtcgtcgccttctacctgtcgaacgcggacgtgttccctggcaaccacgacgaggtggacttcgagctgctgggcaaccggcggggccacgagtggcgcgtccagaccaacatctacggcaacggcagcacctcccgcgggcgcgaggagcggtacctcctccccttcgaccccaccctccggccgcacgcctacgccgtggcctggacccccacggccatcctcttctacgtggatgggacgcccatccgcgaggtggtccgcgtgccggccatgggcggcgacttcccgtccaagcccatgtccgtgtacgccaccatctgggacggctccgcctgggccaccgagggcgggcggtacaaggtcgactacgccttcgcgcccttcgccgccgacttctcgtcgctcgtcctgagcggctgccccgtcgccggcggcggcgacgacctcgcggccgccgagtgccaggtggccacgatgacggcggactgcgccgtcatgacccccgccaagcgcgccgccatgcgccgcttccgccgccggtacctcctctacacggtgtgccacgacatgtaccgctacaacggcaccgtcttccccgagtgcgacgccgacggctcggaacgcgacgacttccacaagtggggcgagtccaagcgcgtgtctcccagcagccgcgggtacaagcagcagcagcagcgcgcggacaaggccgtcgccgttgccgcgcctggccggcccgacacgtggccgaccgtagggacattacgtgtcgactaataatgatatgttacggttattaggagattgatggatttatattagtggacaaatacaaacaagcatagctggctgaaccgctgaagtacatggtactgctgcaatggacacacattacacatagatatagattccatatacatatgtagtgtacacttaactcttttcagtctgataatatatatactccaacttatagtt

SEQ ID NO: 493 - DNA, 3402 bp, Zea mays
agccgatctgatatctgactgacccgcgccgcctgtcgccgtctgcccccacccttcccctccaaatccaacagcgggagcaaagccaaaccaaaccagcttactgctccgctccgctttgttgccaatttccgctccaagcgtcgcggtcgtgaagtctcgttgcgatggattcgaggccccgcgagactgacgcccccggcgacccggccaacggcgccgcccctccgctggccgcggcggtgacggccgcgaccggggacgtcgagatcatcaggccccgcaacgacaagcgtgggtaccgccgcgtcgtgctccctaactcgctcgagtgcctgctcatcagcgaccccgacaccgataaggcggcggcgtcaatgaatgtttcggtggggtacttctgcgaccccgatgggctggaagggctcgcacacttcctcgagcatatgcttttctatgccagtgaaaaatatccagaagaagacagttactcaaagtacattgcagagcatggtggttcaacgaatgctttcacatcttctgaacacacaaacttctattttgatgtgaacagtgatagcctgcacgatgctttagataggtttgcccaattttttatcaagccattgatgtccccagatgctacacttagggaaataaaagctgttgactctgaaaatcagaaaaacctcttgtcagatccttggcgaatgagtcagcttcagaagcatctttgtgcagagaatcatccttatcataagtttagcactggaaattggaacacacttgaagttaaagcaaaggagaaaggattggacacaaggcttgagcttattaaattttatgattcacactactcagctaacttgatgcaactcgttgtgtatggaaaagatagccttgataacctgcagaaccttgttgaaaataagttttgcgatattagagatgttgggaggaagccattttcatttcctggtcatccatgtacacctgaacatctccaggtccttgtcaaagcagttcccattaaacaagggcacactttgagaatcttatttccaatcactcccaatatccgttgttacaaagaaggcccttgcaagtacattagccatctgattggtcatgaaggagaaggatctcttttttacgtacttaagaagttgggatgggctatgagtttggaagctggtgaaggggattggagtcatgatttttcattcttctgcgttgttattcagctcacagatgtaggccaggaacacatggaggatactctcggactattgttcagatatataaagttgctgcagaactctggaactcctaagtggatatttgatgagcttcaagctatctgtgagacaggattccactaccgagacaagagcccccctatcaattatgttgtaaatatttcttctaacatgcagatttttccaccaaaagattggttgattgcgtcatctgtgccatcaaagttttcaccagatgctattcagaatgttttaaatgaactgactcctgagactgtaagaatattctgggaatcgaaaaagtttgaagggaaaacaaaattagcagagccatggtatggtacatcatattctgtcgaagttgtccctccatcaatcatacagaaatgggtagggaaagcccctgaggaagatctacacctgccaaagcgtaacatcttcattccaagtgatctttcactgagaagtgtagaggaaaaggtaagttttcctgccatgctgaggaagacacaattttcgagactctggtacaagcccgatacaatgtttttcacacccaaggcttatatcaagatggattttcactgtccactatctcaaagctcacctgagtcggcagttcttactgatgtattcacaaggttgcttatggattatttgaatgattatgcttatgacgcccaagttgctggcctctattatgttgttaagccaaatgacactggttttcaggtaactatggttggcttcaatgacaaaatgagaacccttttggagactgttattggaaaaattgcagaatttgaagttaaggctgaccgtttttctgtgataaaggaagctatgacaaaggagtatgagaatttcaagtttcggcagccataccaacaagtcctatattattgttcgctaatactggaggaccaaacatggccatgggatgaggaattttctgcactttctcaccttgaagctagtgatctgggaatttttttgccccatttgctatcaaaaaccttcatcgagtgttattttgcaggtaatattgaacccaatgaagcaaacaatatcgttcaacatgttgaagatgtcttattcaatgcaccaattagtgcttgcaagccactatccccatcgcagcatcttgccaagaggattgtaaagcttgagaagggtttgagatactattatccagcaatgtgctcaaatcaccaagatgaaaattctgctcttctgcactatattcagactcatcaggataatgttaagcaaaatgttctacttcaactacttgctcttgttggcaagcagccagcttttcatcaattgcgatcagttgagcaacttggctacatagcgcttcttaggcaaagaaatgattcaggtgtccgtgggttgcaatttataatccagtcaacggtgaaggatcctgctaatctggatgccagagttgaaaattttctcaacatgtttgaaagcaatgtctacaatatgtctgatgcagagttcaagagtaatgtaagtgctcttattgatatgaaactggagaaatacaaaaacatacgcgaagaatcagctttcttctatggagagatttctgaaggaaccctcaaatttgatagaaaagaagcagaggttgctgcactgagggagctcaagaaggaagagttggtaggcttcttcaatgatcatgtcaaggtcaatgcaccacaaaagaagattcttagtatacaagtgtacggtggtctccattctgccgagtacgaaaccatagtgcaaaatgctccgccaccgccgtcgtgtgagataactgatatttatggcttcaggaggtcgaggcctttatatggatcattcaggggaggcgttggtcagatgaagctatagttcaacattttctcatcattctgtaaaattctgaaaaagagtcatctttctgttcaactgcatctacgttgattgttttttcattgcgaacactctagtaggccatttatctacggttttttcactatattcattaagatattatgagatttcacattgccttgtaaagacaaatctctagccatgtttggttggtctgagatacaccatatattagactaaaaaggaaaaaaaaagaaatattcggttaatcaac

SEQ ID NO: 494 - DNA, 1291 bp, Zea mays
ccaagacctccccctcttacctataaatgagaggcaaaagccagtaagccaccaaaccagtaggcaactaagacaaagtggcatactcttctctgtactagctttcttcttcctctcctcttcctcacaaacagactggatttcaacaagataatcctgaaactggagccaacaagcacacagagaaagaagagcaagaagaccggctcccagccgatacaaggtaggagtgagcagcgttagtttcatcatatcgcataggcgatatggtgacagtgagagaggagactcgcaaggggccatggacagagcaggaggacctgcaactggtatgcactgtccgtctgttcggtgaacgtcgttgggatttcattgccaaagtatcaggactcaaccggacaggcaagagctgccggctgcggtgggtcaactacctccaccctggcctcaagcgtgggcgcatgtctccccatgaagagcgcctcatccttgagctgcacgctcggtggggaaacaggtggtccaggatagcacggcgcttgccagggcgcactgacaatgagatcaagaactactggaggacacacatgaggaagaaagcacaggagaggaagaggaacatgtctccatcatcatcctcatcttcactgagttaccagtcaggctacccagatactccatcaatcattggagttaagggacaggagcttcatggtggcagtggctgcatcacaagcatcctgaagggcacccatccggacatggatggctatcccatggaccagatatggatggaaattgaggcgccagaggtgccctcggaggtgggctttgttggagggaacgaaaatgtgtgcagcagccttgccacccctctgccaccacctaccgtctgggaatactacccagaggtctgctggaagcttgacgatgagatcaagatggcaccacaatttggttatatagtgaaggagctgacccctgcttctgataccatatatattgggtctgattactaagttatacaccatcctagcagaagtgaagtgcttttgttgacacaagctttagcatggatctggatatttatctcccgcttagaattggaggcctatggctctatgcatgatttctatgtatctatctagtgtgcaagacaagatcatctcaatttgtccttgatgctatgtaacacaagggcaaaggtgctatgtctgtttactcagaataattagctattccgtgggactcctgttgggcatgaagccaagaataaattttatattgatat

SEQ ID NO: 495 - DNA, 1346 bp, Zea mays
aagcgtagacctaccacagggctgggccaaccagtcccgatcgatcagccagcatggcgtcctcctccaaagggtcgctgccatgcgtgctcctcctcctcgctgtcttccaccacggctgctcgtcggcgagggcccacagacgtgccggcgacatggagaggagcatgagcaccgacgacagctcgatgatagagcggttccagcggtggaaggcggcgtacaacaagtcctacgccacggtcgccgaggagcggcggcggttccgggtgtgcgcgcgcaacatggcgtacatcgaggccaccaacgccgaggccgaggcggcggggctcacgtacgagctcggcgagacggcctacaccgacctcaccaaccaggagttcatggccatgtacacggcgcccgcgccggcgcagctgcccgcggacgagtcggtgatcaccacgcgcgcggggccggttgacgccgtcgggggcgcgccgggccagctgccggtgtacgtgaacctgtccacctccgcgccggcgagcgtggactggcgagccagcggcgccgtgacgccggtgaagaaccaaggccgatgtgggtcatgctgggccttctcgacggtggcggtggtcgaaggcatctaccagatccggacggggaagctggtgtccctgtcggagcaggagctggtggactgcgacacgctggacgacggctgcgacggcggcatcagctaccgcgctctgcggtggatcgcctccaacggcggcatcaccacggagaccgactacccgtacacgggcaccacggacgcttgcaacagggccaagctctcccacaacgcggtcagcatcgccgggctccggcgcgttgccacccggagcgaggcgtcgctggccaacgccgtggcggggcagcccgtggccgtgtccatcgaggccggcggcgacaacttccagcactacaagaagggagtgtacaacgggccctgcgggaccaacctcaaccacggcgtcaccgtcgtcggctacggccaggaggcggccggcggcgacaggtactggatcgtcaagaactcgtgggggcaggggtggggcgacgacggatacatcaggatgaagaaagacgtcgccggcaagccggaggggctctgcggcatcgccatccgcccgtcctatccactaatgtgacatggtgtggtgtacatctgttttcgttttaattatcattttattttattaaacaataaataagtagtcaacatatggatcgactcaaacttttgcagttacgtgtaccagtacacttgttgtaaataataatccatggcatctcgcgtgtaaactttattctggtgc

SEQ ID NO: 496 - DNA, 1645 bp, Zea mays
cgggctagttacgctgttgacaatgatgagtttagattagaaagtgaagataatataagaatacacgcgcgtgtataaagagatccaccatgcatccccatggatggatgcagtttattcctgataaaatctcttcgttcacaaatagacaacatggagtcgtcgttctcgtcgtccttgggtaataacagcagcaggatactggtcattggtggtacggggatgatggggcagcacctcgtcaaggccagcctcgccgccggccaccccacggccgtgctcgtccgcccagccagcagcagcaagctagagcttctcgagaccatcaaggccagcggagcaaccgttattggaggtgacatctacgaccacgagagcttggtggcggcgttccaccaggttgacgtggtcatctccgccgtcggccaccacggaccgcatgacctagaagacggccagctcaggattgtggcagccatcaaggaagcaggcggcagcgtcaagcggttcgtgccgtccgagtacgggtgcgacgtggagcaggccgcgcgatcagcggcggtgctggagccggcgcggagcatcgtgctggccaaggtccgggtccgccaggccatcagagccgccgggatcccgcacaccttcgtctgcagttactgggcgcacggcttcgtgctgccgcgcctcggtgacccccacgccgacgggcttccggccaccagggccaccgtcttcggggacgacgccacgcgcgccatcttcgtgcacgaggcggacatggccgcggtcacggtgagggccgtggacgacccgcgggcgctcgacaagaccctctacctgcggccgccggccaacacctgctcgctcgcccacctggtgcgcctctgggaggacaagacggggagggcgctggacaagtactacatgcccgacgaggagctcgtcaacaggatcagggactcgccgctgccgctcaacttccagctggccatggtgcacgccaccgtcgtcgccggcgtctgcgaccagaccgtcgacgccgaggccggcggcgtcgaggccacggagctctacccggacgtcaactacgtcaccgtccacgactaccttgacggtctcaaggagagcctcacgcgcaacgtcaattcatgaccgcagctcgaacgattatatatacgtactactgtattatctatttgtgtcgtcttacgttgctatacgtgcgtgaataaaattccctacggctacagccggctatagctgcgcagcttcttttcgattcgtgacatatgtacgtccacctacgatgatctacttttttctagagcaaagtacattactagcggtttccgaacttggtacgttatgtcacttagtccttgaactcagaaaacctggcaagcgggtccttgaactttgttcggccatgtaaatcaacacaaagccgggtttgcaaaaccagatgacgacgtgacatgtcatgtctgaatcatttagggttcccaacttgacatattgtgtcacttaggtccccgaacttgaatgttaagtcacttgattccccgaactttcattatttgctctaatgtggcaagatacatcaatatccagtttataatgttacaaatgtacatctttatcttcc

SEQ ID NO: 497 - DNA, 2710 bp, Zea mays
atggagttggaccggctgctgctcgaccagctggctggcgaggccctgcgggagctgctgcacgccgtccagggcaccctgttctgccgctccactgccgagcgcctgcgccggagcgtcgagccgctgttgccgctcgtgcagggcctcggcccgcacgcccagcgctccgcgggggacctcggcgagctcgcggcgcgggtcagggaggcgctcgacctggcccgccgcgccgccacgtccccgcgctggaacgtctaccgctccgcgcagctgtcgcgccggatggaggcggccgaccgcggcatcgcgcgctggctggagcgccacgcccccgcgcacgtcatcggcaacgtgcgcggtctccgcgacgagtcccacgcgcgcatcgcccgcctcgagcgccgcgttgacgagatcgccgccagcgccgcgcagccgccgcccccagccctctccgtccccgtcgcgccgcacaagggcgtgaccatgccgatggaggtgccaactcacaagggcatggctatgccgatgccgatgccggttcctgtgcaggcggtgcccgccaaagccggggtggtggccatggacatggacctcaccgagggacacgaaaacgaggggatggttggcgccggcgttaaggtggccaaggaaaaggtgaaggagatggttatgagcggcggcggcggcggctgggaggtggtcggtatctccggcatgggcggcagcggcaagaccacgctcgccatggagatcttcagggatcataaggtccgagcctacttcaatgataggatcttctttgagacgatctcacaatccgcaaacttggaggccatcaagatgaagctgtgggagcagatcagcggcaacatggtgctcggtgcatacaaccagatcccagaatggcagctcaagttaggaccaagagaccgagggcctgtccttgtgatccttgacgacgtttggtctctcccacagctcgaggagctcaccttcaggttccctgggtgcaagactctagttgtatcgaggttcaagttccccacactggtaaaacagacatacgaaatgcagttgctagacgaggcggcggccttgtccgtcttctgccgtgccgctttcgatcaggagtgtgttccgcggactgctgacaagagattggtcaggcaggtctctgcagagtgcaggggccttccactggctctgaaggttattggtgcgtcattgcgcgaccagcctcctaagatctggctcagcgccaagaaccggctgtctcgaggagaggctatttccgactcccatgagaccaagcttctagagaggatggcggcaagtgtcgagtgcttgtcggagaaggtcagagactgcttccttgatctgggatgcttcccggaggacaagaagatcccccttgatgtcttgatcaacatctggatggaggttcatgatcttgatgaaccagatgctttcgccatcttggttgagctttcgaacaagaaccttcttaccctcgttaacgatgcacagaacaaggctggagatttgtacagcagctaccatgactactcggtgacacagcatgatgtgctgagagatcttgctcttcacatgagtgggcgtgaccctctgaacaagcgtaggcggttggtgatgccgagaagagaagagacacttccaaaggactggcagaggaataaggataccccgtttgaagctcagatagtttccattcatacaggtgaaatgaagggatctgactggttccagatgaacttccccaaggcagaagtgctcatcctcaacttcgcctcaagcctgtactacctcccgccgttcatcgcgtcgatgcagaacctgaaagccctggtgctgatcaactacggcaccagcagcgcggcccttgacaacctatccgccttcaccacgctgaacggcctgaggagtctctggctggagaagatcaggctcccgccgctgccgaagaccaccatcccgctgaagaacctgcacaagatctcgctcgtcctctgcgagctgaacagcagcctgagagggtcgacgatggacctgtccatgacattcccgcgcctctccaacctcacgatcgaccactgcatagacctaaaggagctgccagcaagcatctgcgagatcggctccctggagaccgtctccatctccaactgccacgacctcaccgagctgccatacgagctgggcaagctgcactgcctcagcatcctccgggtgtacgcctgcccggcgctgtggcggctcccggcgtcggtgtgcagcctgaagaggctcaagtacctcgacatatcccagtgcatcaacctgacggacctcccggaggagctcggacacctgacgagcctcgagaagatcgacatgcgggagtgctcgcgcctgaggagcctcccgaggtcgtcgtcctccctcaagtccctcggccacgtcgtgtgcgacgaggagacggcgctgctgtggcgggaggccgagcaggtcatccctgacctccgggtgcaggtggccgaagagtgctacaacctggactggctagcggactgatgtcagattctggatgctaccgcttccaaactgaccatgtacatatatgatgataacgatgatgtttagatgttgcttcccctgtgtagtgcagggaagagaatcatcaatccactggccgattttgacatgt

SEQ ID NO: 498 - DNA, 1347 bp, Zea mays
acacccgcgcaagccgcgccctgattactagtgcattttaaatcccaagacgtctctcactcttcagccgctttacaactccccaccccatcccatccacacacacttcacccagcgcggcggccgccggccgccggcaatggaggccgtggcgcgcagcggcgactacctttggcggttcgtggcggagacagagtggtacaacgaggttgtcctcagcgccgtggcgccaggcgactggtggcgcggcctgccgcacccggtgcagtcatggatgcgcaactgcgtcggcggttacctcctctatttcatctctggtttcctctggtgcttcgtcatctactactggaagcgccacgcctacatccccaaagatgccatccccacaaatgaagctatgaagaagcaaatagttgtagcatcgaaggctatgcctttttactgcgctcttccaactttatctgaatatatgattgagagcggatggactcggagctacttcgatatcagcgaaattggtttttctatgtacctctgttatatggctatgtatctcatctttgtggagtttggaatttactggatgcacagagagttgcatgacataaaaccattatacaaatatctgcatgcaacccaccatatttacaacaaggagaataccttgtctccatttgctggacttgcatttcatccactggatggtgttctgcaagcaataccacatgtgttcgcgctcttcctctttccaacgcacttcaggacacatattgcactcttgttcctagaggctgtgtggacaacaaacatccacgactgcattcatggcaagatatggccagtcatgggtgctggatatcacaccattcaccatacgacataccgccacaactatggccactacaccatctggatggactggatgtttggtacgctcaatgagccagaagatatcctcaagaaggcttgagtttctcggagctgtggtattcctatggtgctggtgctggaactgctcgatctgttcccagtgtttctaatccgttgagcctgttcagcactgtctgtttatgtaggcatcagtgtgttaattagtttgctaggttcatatggctttgtgcttattctgtaatttagcgatgtttgtctcatgacgcaacggagttcaggacgaataaaactttgctagacacattctggattccagctgcttgtacaatgttgcaactcaactgtcaatataggatgtaaaacggattccttctagtcttgtacctgatgagttatttgtggtttctgtgcatgcattgctcagcctatgaatgttgcttatgttttgtggtcaag

SEQ ID NO: 499 - DNA, 2661 bp, Zea mays
atgagggccgtgctgctgctggcgctgctcctgtctgcttgcgccgcggcggcggcgcaaggggccaactccacggcgttcgtgccgcgggacgacatccgcctggactgcggcgccaaggggcagggtaacgacactgacggccgggtgtggaccggggacgcgggctccaagtacgccccgccggacaacctcgcctcggtggcctccgcctccggccaggatccctcggtcccgcaggtgccgtacctcaccgcgcgggtctcggcctcgcctttcacctactccttcccgcttggcccgggccgcaagttcctcaggctccacttctacccggccaactacaccgaccgcgacgccgccgacggcctcttctccgtctccgtcgccgccccggggggcaacctcacgctcctctccaacttcagcgcctaccagacggctgccgcgatcacctactcgtacctcattcgggagttctccgtcaacgtctcgtccccgacgctcgacctcaccttcaccccggagaaggcccaccccaacgcctacgcgttcgtcaacggcatcgaggtcgtgtcctcccccgacctcttcgacatctccactcccaacatgcttgccggcgacggcaacctccagccgttcccgatcgatgctggcactgcgatgcagaccatgtaccggctcaacgtcggaggccaggcgatttcgccctccaaggacacgggcggttaccggtcctgggacgacgactcatcgtacatctttggtgctagcttcggggtcagctacccgaaggatagcaaggtcaccatcacatatccaagcaatgtgccggagtatgtggcgccagaggatgtctacggcacggcgcgatccatggggccagataagaatgtgaacatgaactacaatctcacatggatgttggaggtggatgctggattcatgtaccttatcaggatgcatttctgtgagatccagtaccccatcacaaagatcaatcagcgggtcttcaatatttacattaacaaccagactgcagtcaagggtgctgatgtgaatgcctgggcggccgtaagtggtgctaccacccttattggcactccggtgtatcaggactatgtagtgagcacaacgggtttaggggccatggatttatgggtagctctccatcccaatcccgactcgaagccacaaatatatgatgctatcctcaatgggatggaggtgttcaagctacagcttaccaatggcagccttgcagggctgaatcctgtgccaagtgttgccccggtgcctgatgggacaactaagaagaagtcaagtgttgggcctattgtcggtggagtggttggaggtttggtggttcttgcacttggctattgctgctttgtgatctgcaagcgcaggaggaatgccgggaaggatgcaggcatgagtgatgggcattctggttggctgcccctgtctctttatggcaattcacacacttccagttcggccaagtcacacactactggtagctatgcttcatctttgccatccaacctgtgccgccatttctcttttgctgagatcaaggccgcaacgaacaactttgatgagtcccttattcttggtgtgggtggatttggtaaagtttatcgtggtgaggttgatgggggaacaactaaggtggctatcaagcgtggcaaccccttgtctgagcagggtgtgcatgagttccagactgagattgaaatgctgtccaagctccgccaccgccatctggtgtcactgattgggtactgcgaggagaagaatgaaatgatcctggtctacgattacatggcccatggtactctccgtgagcacctgtacaagacccagaagccacctcttacctggaggcagcgtttggatatctgtattggtgcagctcgtgggcttcactaccttcacactggtgcaaagcacaccatcatccaccgtgatgtgaagacaacaaacatcctgctggatgagaaatgggttgccaaggtttcagattttggtctgtccaagactggcccatctatggaccatactcatgtgagcacagttgtcaaaggcagttttggttaccttgatcccgaatacttccgcaggcagcagctcacagagaaatccgatgtctactcatttggtgttgtgctgtttgaggtcctctgcgcacggcctgccttgaaccctactcttccaaaagaagaagtcagcttggcggagtgggcgttgcactgccagaagaagggcatccttgaccagattgtcgacccctacctgaagggaaagatagccccacagtgcttcaagaagttcgccgagacagccgagaagtgtgtttctgatcagggaatcgaccgcccttcgatgggtgatgtgctctggaacctggagttcgcccttcagatgcaggaaggcgcagaagagagcggaagccttggctgcgggatgtcagacgagggcgccccattgatggtcgggaagaaggacccgaacgacccatcgatcgagtcaagcaccaccaccacaaccaccacttctataagcatgggcgaccaaagcgtcgcgagtatagactcggatgggctgacgcctagcgccgtcttctcgcagatcatgaaccccaaggggcggtga

SEQ ID NO: 500 - DNA, 2050 bp, Zea mays
acccatctccctctgctccgggcgcaccgtcaccggggtgaggctgtattgcgtcgacagcaacacctgctttcgctacgacgggagcaccagaggctaggatatattgcttcatcagtgacagggagccaagatgccggccggagggttctcggtctcggcgccgtccggcgtcgagttcgaggctaagatcacgccgatcgtcatcatctcctgcatcatggctgccacaggcggtttgatgttcggctacgacgtcggcatctcaggtggtgtgacgtcgatggacgacttcctgggcaagttcttcccggcggtgctgcggaagaaactggaggacaaggagagtaactactgcaagtacgataaccagccgctgcagctgttcacgtcgtcgctgtacctcgcggggctgacggccaccttcttcgcctcgtacacgacgcggcgcctcggccggcgcctcaccatgctggtcgccggcgtcttcttcatcgtgggggtgatcttcaacggcgccgcccagaacctcgccatgctcatcgtcggcaggatcttgctcggctgcggcgtcggcttcgccaaccaggccgttcccctgttcctgtctgagatcgcgccgacgaggatccgcggcgggctcaacatcctgttccagctcaacgtcaccatcggcatcctgttcgccaacctcgtcaactacggcacgtccaagatccacccgtgggggtggaggctgtcgctgtcgctggcaggcatcccggcggcgctgctcaccctgggcgcgctcttcgtgacggacacgcccaacagcctcatcgagcgcggccgcctggacgagggcaaggccgtgctcaagaggatccggggcaccgacaacgtggagccggagttcaacgagatcgtggaggcgagccgcgtggcgcaggaggtcaagcacccgttccgcaacctcctgcagcgccgcaaccgcccgcagctcgtcatcgccgtcctcctccagatcttccagcagttcacggggatcaacgccatcatgttctacgcgccggtgctgttcaacacgctggggttcaagagcgacgcgtcgctctactcggccgtcatcacgggcgccgtcaacgtcctctccacgctcgtctccgtctactccgtcgaccgcgtcggccgccggatgctgctgctggaggccggcgtgcagatgttcctgtcgcaggtggccatcgccatcgtgctgggcatcaaggtcaccgaccactccgacaacctgggccacggctgggccatcatggtcgtcgtcatggtctgcaccttcgtctcctccttcgcctggtcctgggggcccctgggctggctcatccccagcgagaccttcccgctggagaccaggtcggcggggcagagcgtcaccgtctgcgtcaacctgctcttcaccttcgtcatcgcgcaggccttcctctccatgctctgccacctcaagtacgccatcttcgtcttcttctccgcctgggtcctcgtcatgtcgctcttcgtcctcttcttcctgccggagaccaagaacgtgcccatcgaggagatgaccgagagggtgtggaagcagcactggttctggaagcgctacatggacgacgacaaccaccacatcgtcaacggcaagctcaccggcgcctccgtttaactactccgtctgctctgttcatgcatcagactcacttgatagtactacagcactactactgcaacaccgcaaccgcaatcccgatggcaattgctagtactgcaactgcgatggcaatgccgccttgttgttgtacaatagcccagtgtttcggccagagtccgtgctcatctttgatttgtagtatctttcaattttcaagcagagtttacacggattgtaatcacatccttgcctggtcatctaaaactacatgtgtactatttccggcgctataacgtgtggttgattcatcacagacagtcagtcgtactcgtaggctcgtaccatgttctgagcttcaggcaagcatatatatatagtttttagtgc

SEQ ID NO: 501 - DNA, 2540 bp, Zea mays
cgatcgccaggcgccagcagcaggctagctctgctccgccgctcactgctcgctagctactggaccgcgcttccctctctccatcgcgccggcgcgcacggctagctctagctcccggagccgccctttcatggtccccgccgtggtcgggacgagatgcctccgctcgcattcctccgccgctacctccccgcgaggcttctcgcgcgagcgtgcgatggtggagtccgggggagcccgggcgtggcgcgggacgaggaggccggaggcagcggcggactgagcggccggtcggcgggggcgccgtccggggagtgctacgcgtgcacgcagcccggggtgccggcgttccactccacggcctgcgaccaggtgcactcgccggactgggacgccgacgcggggtcctcgctggtgccggtccaggcgcagcagcaggcccagccggcggcggcggcggcgcagcacgcggcgcggtggctgttcgggcccgtgctggacccgcgcagcaagcgcgtgcagcgctggaaccgctggatcctgctcggccgcgccgccgcgctggcgctggacccgctcttcttctacgcgctctccatcggccgcgccggccggccctgcctctacttggacgccggcctcgccgccgcggtcaccgcgctccggacctgcgccgacgtcgcgcacctcgcgcacgtgctcctgcagttccgcctcgcctacgtctcccgcgagtccctcgtcgtcgggtgcggcaagctcgtctgggacgcccgcgccatcgccgcgcactacgcccgctccgtcaagggcctctgcttcgacctcttcgtcatcctccccatcccgcaggtcatcttctggttggttataccaaagttaattagggaagaacgtgttaggcttatcatgacgatactgctactcatgttcatatttcaatttctccccaaggtctaccatagtatacacatcatgaggaaaatgcagaaggtgacgggttacatctttggatcgatatggtggggatttggtttaaatctatttgcctatttcattgcttctcatattgcaggtgggtgctggtatgttcttgcaatccagcgcattgcttcctgcctccaggaagaatgcaagaaaaacaatagttgtgatctaatatcactagcttgttcgaaggagatatgctttcaccctccttggtcttcgaatgttaatgggttcgcatgtgatacgaacatgacctcctttagtcaacgaaatgtgtctacttgtttaagtggtaaagggtcgtttgcttatggaatctatttgggggctcttcctgttatatcgagcaattcgcttgctgtcaaaattctctatcctatattttggggactcatgacactcagtacttttggtaacgatcttgccccaacaagcaatggtattgaggtgatattcagcataatcaatgtcctcagtggcctgatgctcttcacattgctgatcggaaacatacaggtatttctgcacgcggtcctggcaaggaagcggaagatgcagctgcggttccgagacatggaatggtggatgagacggaggcagctgccgtctcggctgaggcagagggtgcgcaaatatgagcgcgaacgctgggccgccgtcacgggagacgaggagatggagatgatcaaggatctgcctgaaggactgaggcgggacatcaagcgctacctctgcctcgagctggttaagcaggttccgctgttccatggcatggacgatctgatcctggataacatctgcgaccggctgcggccactggtgttctccagcggggagaaggtgatccgagagggcgaccccgtgcagcgcatggtgttcatcctgcagggcaagctccggagcacgcagccgctgaccaagggcgtggtggcaacgtgcatgctaggggcgggcaacttcctaggcgacgagctgctgtcgtggtgcctgcgccgccccttcgtggaccggctccccgcgtcgtcggccacgttcgagtgcgtggaggcggcgcaggcgttctgcctcgacgcgccggacctgcggttcatcaccgagcacttccgctacaagttcgccaacgagaagctcaggcgcacggcgcggtactactcgtccaactggcggacgtgggccgccgtcaacatccagctcgcgtggcgcaggtatagggcccgggcatcgacggacctggcggcgatggccgcgccgccgttggcgggcggacccgacgacggggaccggcggctcagacactacgcggccatgttcatgtcgctccggccgcatgaccacctagagtgatcaggaggggggacgggaccatcctagctgtgccggccgggtcatggtgtctgtacagtgtacactagtggtatgttgttgtcatcttctgcgtgagtgaactggtggttcgggatttgtcatttaaagaaggtcaataatggagaaatagtttcttagcccgattcaattgtcttcctttcaccaagaataaaaattacttctgc

SEQ ID NO: 502 - DNA, 1333 bp, Zea mays
atcaatccgatcgacatgaacctcgcgtccgcggtgcgagtgttcttgtcctactacctgctggtccaacggtggatggggtccgagcagggcggaggcgtgttcgatcaggggggccatagcgtcagcctcacccgcctcgacgaagcaagggcgccgccgaggtgcgccgtgcggtcgtccccgtccagcgcggccagcctgccgccgaagccgctgctcgtcgccgcgccgcgcgagactggggagtacccggtgatcctgttcctacacggctacctcgccgtcaactccttctactcccagctgttcgagcacgtcgcctcccatggctttatcgtcgtcggacctcagctgtacaccatatctggggccgacaccaccgaggagatcaactcagcggcggccgtcatcgactggctagccaccgggctgccgtcaactctgccactcggcgtccgcgcgaacctaaccaaggtgtccatctccggccacagtcgcggcgggaaggtggcgttcgcgctggcgttgggccacgccaaggccaagctcgctgtccctctcgccgccgtcgtcgccgtggacccggtggacggcatgggcgtgggcaagcagacaccgccgccgatcctcacgggcaggcacggctcgctgcacgtgggtgcccccgccatggtcatcggcacggggctcggcgagctgccccgcggctcactgctcccgccgtgcgcgccccggggcgtcagtcacgcggccttctacgacgagctggacggcgcggcgccagcgtgccacctggtggtcagggactacgggcacacggacatgatggacgacgacacgccgggcgccagggggatgctcacgcgcaccatctgcaggagcggcggggccagggcgcccatgcgccgcttcgtggccggcgccaccgtcgcgttcctcaagaaatgggtggctggggacgccgcggcgatggacagcatcacggcgcggccggaccaggcccccgtcgcgctgtccgtggtggagtttggagatgagaaagcgatagcttagctgctagagaatatgtgatatctgcaggcactagccactcaggcaggttggtgacgacgttgaaattgcagatgaaattaactagagtctagagatggcacatggcagattggcagtgagtttcgaaactagctaatttcctctctcttggcaaatcaaataaaaaaataaaaaagtacctattctataggatgaactgagtatgaaatggacattaccttgatgcgatgataaataaaaaaaaatagatggaatagacatgcatgctacgacaata

SEQ ID NO: 503 - DNA, 2174 bp, Zea mays
ggacgctaggcaccgttgtggctgtgcggaactgcacaagagcgtttcgcctcggccaccacgaacggagaaggcggcagccatggccatggaggaagcggggaagatgacatgcaggaagaagggtggtctgagaacaatgcccttcatcttcgcaaacgaggtggcggagaagctcgccgtggtgggtttctcgaccaacatgctgacgtacctgaccactcagctgcacatgccgctggcgaaggccgccaccacgctcaccaacttcggcggcacctccgccgcgacgcccctcatcggtgccttcctcgccgacgcctgcatcggccggttctggaccatcgccgccgcgtccgtcgtctaccaagccggcatggcgctcctgacggtgtcagcggcgctgccgcggttccggccggcgccgtgcaagcccggcggcgcggtggcatgccaggaggccgcgccgtggcagctggcggtgctgtacgtgtccctgctcctgaacgcggtgggcgcgggcgggtaccgcccctgcatcgtggcgttcggggcggaccagttcgacgagtcgcgggcggcggagcgcgcgcggagctggggcttcttcaactggtactacttctgcaacggcgcgtccatgctgctggccgtcacggcggtggtgtacgtgcaggacaacgtgggctggggctggggcctcggcgtgccggccttctgcatgggcgtctccgtcgccgccttcgtggccgggtacccgatgtaccggaggctggagcccgcggggagcccgttcacgcggctcgcgcaggttgtcgtcgccgctgtcaagaagcggcggctgccggcggcggacgtcgaccccgcgttgctgtacgaggacgacgagctcgacgcgcccatctccatgtacggcaagcttgtgcacacggatcagctcagcttctttgaccgcgcggcgatcgtcaccgacggcgacctggtcacgctgacggacgcggactccggcaagccgtcgacggcccccgtcccggacctgtggcgcctgagcaccgtgcaccgcgtggaggagctcaagtcggtgatccgcatgggtcctatctgggcggcgggcatcctggtgatcacggggtcgtcgacgcagaacaccttctccctgcagcaggcgagcaccatggaccgccgcctcgcgccgggcctctccacgttcgagatccccgcggggtccatgaccgtcttcgggctgctggccatgctcttcaccctcttcgtctacgaccgcgcgctcatccgcgtggcgcgccgcttcacggggctggaccgcggcatctccttcctgcaccgcatgggcgtcggcttcgccatcagcgtgctcgccaccctggtcgccggcttcgtggagcggcaccgcagggacgcggcggcggcggccggcgccacggacgccggcacgtccccgctgtcggcctactggctggtgccgcagtacgcgctgcacggcgtggccgaggcgttcacctccgtggggcacctcgagttcatgtacgaccaggcgcccgagagcatgcgcagcacggcgacggcgctcttctggctgtccatctcgctgggaagctacgcgagcacgctgctggtggacgctgtgcaccgctggagcgcggggcccggcggcgccaactggctgccggacaacatcaatcacggcaagctggattacttttactgggtcgtcacggtactgcaggtcatgaacctggtgtactacgccatttgcgccaagcggttcacgttcaagccagtgcagctccacaagaaagaggaagaagaaggcggcaaggcacttgtggagttgcaagagaaggtttaatttgagcagcatgcactttcagctatgtgcaggtacatgtctaatagaaaggaagtactcatcagtgctaggaagatcctcagaaaaactcccaaggtattactatataaatctatgtgagcatcttcccctgtattagtcaagtagatcaagaatgcaggaaggttgttcaggcaagcaacctcagaaattgtcaaggatcacatgacagctttgtggatggcagaagctatctggtctggtcctgagacttggcacaggtgcaaaacacaactgactatatttgtaattagaaagcaggcacgag

SEQ ID NO: 504 - DNA, 3402 bp, Zea mays; identical to SEQ ID NO: 493

SEQ ID NO: 505 - DNA, 453 bp, Zea mays
atggccgctgcctcagcttcgcttctccacctcgcgaccccgaccctgactcgctccactcgcctcgccgtccgcctccccagcgcccagctgtcgcgctggccatcgggggcacgcatcgccgccgcgcagccgccgcgggcgtacaaggtgacgatcgagcacggcggcgagtcgcgggtggtggaggtggaggaggacgagacgatcctgtcccgcgcgctggacgagggcctggacgtgccgcacgactgcaagctcggcgtgtgcatgacgtgcccggcgcggctggtctccgggacggtggaccagagcgacggcatgctcagcgacgacgtcgtcgcgcgggggtacgcgctgctctgcgccgcgtacccgcgctccgactgcaccatccgcgtcatccccgaggacgagctgctcaaggtccagctcgccaccgccgacgactga

SEQ ID NO: 506 - DNA, 1030 bp, Zea mays
gcactcatccattccatcatcccctttgcaagtatagtctctctgctaagcgaagcggagctggggtcctggtcgctgtaccgcgccgtgatcgccgagttcatcgccacgctgctgttcctgtacatcacggtggccaccgtgatcgggtacaagcaccagacggacgcgtcggcgtcgggcgccgacgcggcgtgcggcggcgtgggcgtgctgggcatcgcctgggccttcggcggcatgatcttcgtcctcgtctactgcaccgccggcatctcggggggccacatcaaccccgccgtcaccttcggcctcttcctggcgcgcaaggtctccctggtgcgcgcgctgctctacatcgtggcgcagtgcctcggcgccatctgcggcgtcggcctcgtcaaggcgttccagagcgcctacttcgacaggtacggcggcggcgccaactcgctcgcctccggctactcccgcggcaccggcctcggcgccgagatcatcggcatcaacccggccaggagcctgggcgccgccgtcatctacaacaaggacaagccctgggacgaccactggatcttctgggtgggccctctcgtgggcgctgccatcgcggccttctaccaccagtacatcctccgggctggcgccatcaaggccctcggctccttcaggagcaacgcgtgatgagcggggcttggctgtggagcaatggcgggcgacctacgggcggggggccgtgagcgaggagaatgccatcattcatcgatcgacttgggtgccggtggttggttcgggtcgccttttttttgtttcagcagctgctgcgttgcgcgcgtgcgtgagatttggtttggtttcgttcccctgcaatgtaatcatgtcgtgactctcaagggattattccgctctgctcttatggtctctgttttctatttaatgattgttattaccatgtagcagtaaccatcgtcatcagtgagaaccttgttgcttctgtctaaatcaaccgagacgtgtggagtggatggat

SEQ ID NO: 507 - DNA, 1331 bp, Zea mays
gcacatgcactcctcctctcttgcccaccagcgactcccgtagctggaactcgctcgtcaaaaggaaaagaaacacttcgcttcagctggttgacagacgactcagagcaaaatgggtatactggtgattacggtggacctagactgctgtcgctgcagagccaagatcaccaaggtcctggactgtctcaaaggagtttaaatatgggtattgggatggaggagttctgcatcgagaaagtggagttcgatgacaagaaggagaagaaggtggtggtggtgcgtgggaagttcgacgccgagaagctctgcaagaaggtgtggtccaaggccgggaaaatcgtgaaggggattgtcatcgctgaggtgtggccaataccagccccgcccaaggagtgcaagcctgaggcaccgaaatgttgcgactgtgagaagtgcaagccgaagcctaagccggagccaccgaaatgttgcgactgtgagaagtgcaagcccaagcccaagcctgagccaccgaaatgttgccactgtgagaagtgcaagcccaagcctgagcctcccaaaccagagaaatgctgcagtgcctgttgtcactgcaagcctaagcctgatcccaaaccgctgatatgttgtgtctgttgccactgcaagccggagaagaaggaagagaagaaggaagaaaagaaggacgaaaagaagccggcgccggccaaaacggagtacaagtttgtgccctacccgtacccgctgccgaaccccgcgatgtgcccgagctggccgtggcagtgcccgcctcagcagcagtgccagtgctgccagaagcctccgcctccgccgcccaagtcgccgccgaagccgccgccgtgcacctgttcgagccacgccgcctgtgtctgcggcaagacaccgccggcggtctggccaccgatgccgccgccggtctggccgcccccgtggggcacctgcaacgtcgtcaccgaggagagcccgtgctccgtcatgtgacgctacgcgcttgctttgtcatgtactcgtcgctgttggcctgttgctgtgctgccatcggtactggacctcggtgctacttgggccggtgccattctgtgtagtgaaggtacagtgcatcgtctgcagatgtgcttgcctcctacagtctcttatacgaacgtgtcacgccttgttttattgcagtaattatgtagcttccagccataatttgctactctgtatatgtggtataagatgaattttcatagctcggctccatggaaattcaagaaatctgtcacatccgcatggaaatttaaggacaagttaaaacatggatataa

SEQ ID NO: 508 - DNA, 2441 bp, Zea mays
atgccgctgccgctgccgctgccgccgctcctgctctgcgtctgcgtctgcgtctgcctctgcctctacctcacccacctcccccgcctcgcctcctccgagcccgacgccgacaaggcggcgctgctggcgttcctcgccggcgtgggccgcggcgccaccgcgcgcgcgcgcatcaactggcccaccaccccgctcgcctgcgccggccccggaccgggctggacgggagtcacctgcagccccgacggcgcgcgcgtcgtggcgttgcacctcccggggctgggcctctcgggcgccgtgcaacccggcacgctcggccgcctcacggcgctgcagctgctcagcctgcgctccaacaacctgtcgggcccgctccccgccgacctcctgcgcctgcccgcgctcgcggggctccacctccaccgcaacgccttctccggcgcgctcccgcccgggctcgcggggctcgccgcgctccaggcgctcgacctctcctccaacggcttcggcggcggcatccccggcgcgctcaccagcctcacccgccttgtcgcgctcgacctctccaacaactcgctctccggccgcgtcccggacctcggcctccccgcgctccagttcctcaacctctccaacaaccgcctcgacgggcccgtgccaccgtccctcctccgcttcgccgacgccgcattcgcgggcaacgacctgacgcgcccgcccgcagcagctcctcccgccgccgccgcccccgccgcgcggacgcggcgggtcaggctcagcgaggcggccatcctcgccgtcgccgtcggcggctgcgtcctcgcgttcgccgtcgccgcggtgctgctcctcgcattctgcaacagggagggccgcgacgacgacgacgacgacacgggaggggccggcgggaagggcggggagaagaaggggagggagtcgccggagtccaaggccgtcatcggcaaggccggggagggcaaccggatggtcttcttcgagggcccggcgctggcgttcgacctggaggatctgctccgcgcctccgccgaggtcctcggcaagggcgcgttcgggacggcgtaccgggccgtgctggaggacgccaccacggtcgtcgtcaagcggctcagcaaggaggtgagcgccgggcgccgcgacttcgagcagcagatggagctggttggccggattcgccatcgcaacgtcgtcgagctccgcgcctactactactccaaggacgagaagctgcttgtgtacgattactacgccagcggaagtgtatccaacatgcttcatgggaagaggggagaggagcgaacgccattggactgggaaaccaggtggaagatcgctctgggtgcagcaagaggagtggcacacgtccacgccgagaacaacggcagatttgtccacggcaacatcaaggcctccaacgtgttcgtcaacagggacggatacggctgcatctcggacctcggcctggcacagctggcgaacccgatcgcggcgaggtcccgctccctcgggtactgcgcgccggaggtcgccgacacgaggaaggcgtcgcaggcttcagacgtgtacagcctcggcgtcctcgtgctggagctgctcacggggaggtcgcccgtccaggtatccggcgggcgcggcagcgaggtcgtccacctcgtgaggtgggtgcagtcggtcgtccgcgaggagtggaccgccgaggtgttcgacggcgcgctgctgcgggtccctgacatcgaggaggagatggtggagatgctccagatcgcgatggcgtgcgtgtccaggacccccgaccggcggcccaaggtggcggacgtggtcaggacggtcgaggaggtgcgccggagcggcaccggcacacggccgccctccccgccggccaccgccgcggatgcagaccagagtgagatggagagctcctcctcggcggcggcggcggcggcgcagtgacggcgggagttgatgcttcgcagccgcatctggtgatccgttcgtcgccctttgtgttgtgctcttccaaatccacggccattccattcttttggcgggtgctgtaccattccattctttttttctctctctcttgtgttaagaagattccgtgttacgaaattgtaacacagtgtcacgtggagacggtggtccgtccgatgctcatggcagcagttgctcactccttgccgatgagatgagagtgtcagcgcatgaagacaagcaattaacattcggtgctgctttgctctgttgcttcttcagcttcggatcagatgcccttgagggcatggcaatggtttgcatcgtttgagtactcaacttgggcttgttcggttagctcttaatctacgtgtattgagtgagattagatgagtttgaatcccaaataagttaaaattattcttaattttttggaatcccat

SEQ ID NO: 509 - DNA, 489 bp, Zea mays
ctcggatggtcgatcggttatatataggccagggagagttctgcgtacgccattattatccacaacactcatcgatctacacacatacatagtttcttctactacacgacgacaaacatggggaagcctgcgaagatcggagagtggggtggatacgccggcgatcgtcgggatctgagggctactccggaccggctgatcgaggtgaaggtcacggcggacaacagcagctgcatccgctccatctccttcatctacatcggagccgatggcaaaccgtacgaggaggggccatggggtttcggccatgctggcacggagtacaagtctctcaaattcgtcaccaacaaacgcgcttacggaccgtacggcagggacgagggcaccccgttccgtgtcaaggtgatgaacaacggccacgtcgctggcttctttggccgctctggagattgcctggacgcgatcgggctctacgtgaaccccaactaa

SEQ ID NO: 510 - DNA, 321 bp, Zea mays
atgtggagcctggtgcggcgatggcgatgggggcggcggaggcggacggcgcgggtggtggacgagagcgcgctcggcgcagacggcgatactgacggtggcgccgccgctccggccgcgggcggcgcggtggtggcgccgacactgggtggcgctctagccagggcgctgctggcgctggcgtgcgccatccgcttcgacggcgcggacgtcagcgcgacggaggaggcgtgggccgtcacggggtggcggccgcgcgccgccgacgaggtcagccacctcatggtgcgcgagagcatgcgctacgccatctacgcgtag

SEQ ID NO: 511 - DNA, 2367 bp, Zea mays
atgctggtggcgttgttcttcctggcggcgctactggcggccccggcgcgttcgtcgtcgccgtcgtccaacaacggcgccggtcttcagcagcccaccctgaccgtctgctccgggcactccactgtcgccacgagcggcgagttcgccagcttcctcgcagccgtgtgcgccggagcctacggcggcggcgtcgccccccacatgtcccacagcatgtcctcgtacgtcgccgccgagaaccggaccaccatgtacggggcggcggccggatctacgggctcacgcggtgcctcggcggtgcctcggccggatctacggatctacgggctcacgcggtgcctcgccgccgggatctcgtgcgccgactgccgccgctgcctcggcggcgctctcgcggtggtagagcgggagtacaacggcagcgcggggatgcaggtcctgcggctcagctgcatggccaggtacgagagctaccccttctacaacaccaagtccttggcccggcgatcgctggcgtcggcgatgatcgattacttccccttaaatgtatcatcatcctttcctgcgagtgtggggggtgtacaacccacaccagcgcctcctggcggtcgtaacccatcgccttcaccgcctgcacaagcacgagcatcacctgcaccagcagcaccgttgaacatctccgggcctgcaactgcgactccgagagctgcacaacccaccccagcgccccctggcggtcgtactcgtaccccacagcatgcagctgccgcaacgaatgatcaaacggcctccggatcatcagagaacaaaaggaaggaaacttcgaatagaaccaaatggctgatcgcttctattgcaactgggttggtggctgccttcaccagcctcgcactcaccatgtccatatggtaccggcggcgaaaacagcaactgtatcagagaggacatgtcatagatgccgtgcccgaggatactatgcgtgacctagagaagaatcatttggactccgaagaagaagaagacgaggacggaggaagaacgagctaccagctctacaactacctggttcttgaggctgctacatgtcgcttctcaagtagaaacaagctagggagcggtggatttggaacggtatacaagggcacgcttgagaatgggaaggaagtagcagtgaaaaggctcagggactccaagaggacgatacaagaactagagagggagatctccattgtggctagcttgcgccataagaacatcgtgaggtttttaggctactgcttccaagaggaagggaggttcttcatctacgagtacgtgcctaataacagccttgataagttttggtacaaagcatcttctcaatggcaccagaggctagagtgggctacatggttcaacgtcatcttaggggttgctcgcggccttaagtttctccatgacaaggggattattcaccgggacctcaagccacacaatgtacttctcgaccataacttcaacccaaagatcgccgattttgatctcttgaggatgtatgatcaacagaaaactcatgagagcaccgagaaggccgctggaacattcgggtatatggcaccagagtgcacatccggacgaaaattgctgctttcaatcaagtccgacgtgtacagctacggggtgttggtgctggagatcatcaccggccacaagatctacactttcgaaggccaaaactctgaaggcctcgtcgaatacgtgtggcagcactggacggagaagagagcgagcgacgtcgtggattgcgacttgggcatggaagggcaggagcacgggccatggcaggcgctgcggtgcgtgcacgtcgcgcttctctgtgtgcagtcggatcggtcgaggcggccaactatggggcaggtcatcgccatgcttagcagtggcgatgacgggacggaggagctaccggagccatcccggcctgcctggaaaggaacactgctctgcgaaaaactgagtcaattatattcacaagctcttcaatagatgggttccacaggctgcaagttatggaatgccatagtggggatatagtaatgcagtggtcaatcctctagggtaggcaaacctgatattaatgaatgcatggaatggactacatgattgcttccatgcagatcaagcggtagcatcagctgccatatacgatccatctatatgccatcttagaagttttaaagctccttgtttgcatgtaattcgaaatttactattagccattgtttctgaacaacccttgattttatttcttgaatgtacacctgattcgtctaatggaatcatggaccataggttgtgcaactgttttggttaagagttacaatgatc

SEQ ID NO: 512 - DNA, 1803 bp, Zea mays
cgagttctcagcaccggccgatccatcctcctccgcctccctcggttcggcctctggcctgcacaccatgaactctcgcttccggagcctctggagagccatggctggggctttgcagccgccgtgccgcctcggagctgccgcgtgtagcttgctcgctaagcagcagctatagtagctgagcgagtgcgtccatcgatcggagtcgtccacctccgtctccctttgcgattcggcgtcgtgaactcgtgttcttgagcgtgggggcaaggggcagagcaacaaggagacacttcttcttcttctttacaacaaataagaaagcaacggcaatggagggagctggtctgcagtgacagtgacacgagccatggatcccgagccattcgtgcggctctcagttgggcagctcggtctgaagctccccggcgggaacgctagcaaggcggccggccggctctgcgactgcgagatccggctgggcgggttcccggtgcagaccgctccggtgccgctggtccactccccggcgttcaacctcgacccattcaccaacgcggcggttttctccctcgaggaatccgacctcaaggcgctggcggcgccggggtgcttccgggccccgcggtcgtcgtgccttgaggtcgcggtgtactacctggcccgcttcggcgcttcacgctgtggtgtcctcgcctgcgggaggaagcggctggttggcgtgttcagggtggagctcgcttcgtcggaatggcgggacggcaagcccgtgctgctgcaccatgggtgggcgggcatcggcaagggggcggccaggccggagctccacctcagggtgaagctggaggctgacccccgctacatcttccagtttgacgacgagatcgcgctcaacccgcaggttgtccagctccatggcagcatccggcagcccgtgttcagctgcaagttcatccgcgacaggcggccatctcagagtgaccctttgggcggcgggcagtactggtcgagctccagcagcgaggagcaggacatggagatggtgaggcgggagaggaaggcctggaaggtggtgatccacgacctgtccggctcggccgtagccgcggcgtttatggccaccccgtttgtgccggcgccgggcggggacacggtggcacggtccaacccgggcgcctggctcatcgtgcgcgccgacaccacggggtcctcggacagttggcagccgtggggccggctggaggcgtggcgcgaggcggcggcggcggcggcgagcagcggcaaggacacggtgcgcctgcggctgcacctgctcccggaccgccacgacgactgcgtgctcgtgtcggaggcgcccctgagcagcgacaagggcggggagttcttcatcgacatggacaggcaggcgccctccgccacggcggcggagcactgcgcggcgagcctgggcgccgcgtgcgccggcggcggcttcgtcatgagctgcagggtggagggggaggcgaggagcagcaggccgttcgtgcagcttgccatgcggcatgtcacgtgcatggaggacgccgccatgttcgtcgcgctcgccgcggccgtcgacctcagcgtcaaggcgtgccgcccgttccgcaggaaaccgaacaagaaggccgcctcgccgtcgcccgaccacctcgagctcgacacctaggaacgcagaacaggaaggccccgccgactagcacccatggccgcccatggatccatctaactcgacctgtaaattcacttaatttcaagagctggactgaatcgtttgccacaatc

SEQ ID NO: 513 - DNA, 2967 bp, Zea mays
agaggcagaggcagagccaagacggttccgttcagtgtctggcggcgcatagatagatagccatggcgaagaagccagtggaggaagcgctcctcgcagcggcagacgagcaggagagcctgagcgtgcgcgaggagctgaagaagcagctatggctggctgggcccatgatcgccggcgcgctcctgcagaacgtgatccagatgatctccgtcatgtacgtgggacaccttggagagctgcccctcgctggcgcatccatggccaactccttcgccaccgtcaccggcctcagcctgctgctaggcatggcaagcgctctagacacactgtgcggccaagcgttcggcgcgaggcagtactatctcctgggcatctacaagcagcgcgccatgttcctcctgaccctggtgagcgtccctctgtcagtggtgtggttctacaccggcgagatcctcctcctgttcggccaggacccggacatcgccgcagaggccggcacctacgcccggtggatgatcccgctgctgttcgcgtacggcctgctgcagtgccacgtccggttcctccagacgcagaacatcgtggtgcccgtgatggcgagcgccggcgccgccgcggcctgccacgtcgtcgtctgctgggcgctggtgtacgcgctcgggatgggcagcaagggcgcggcgctcagcaactccatctcctactgggtcaacgtggccgtgctggccgtgtacgtgagggtgtccagcgcctgcaaggagacgtggacgggcttctccacggaggccttccgcgacgcgctcggcttcttcaggcttgcggtcccgtccgctctcatggtctgcttggagatgtggtcgtttgaactcattgtgctcctctcgggccttcttcccaacccaaaactggagacctccgtgctgtcgatcagccttaacactgctgcgttcgtgtggatgatcccctttgggcttagctcagctatcagcactcgcgtgtcgaatgagctgggtgccgggcgtcctcgagccgcccgccttgcggtgcgtgtcgttgtgttgctgtctgtcgccgaagggctaggcgtgggcctcatcctggtgtgcgtgcgctacgtctggggccatgcctacagcaacgtcgaggaggtggtgacgtacgtggccaacatgatgctggtcattgcagtgtccaacttcttcgatggtatccagtgcgtgctttcaggtgtggctagaggctgtggatggcagaagatcggtgcctgcatcaaccttggcgcctactacatcgtcggcatcccctctgcttacctcatagcgttcgtcctgcgtgtcggtgggacgggactctggttgggcatcatatgtgggctcatcgtacagctccttctgctcgcgatcatcactctctgcaccaactgggatagcgaggcgtcgatcaagttccgggacgacgaccgaccgctgctgcgcgccaaggtgccgattggcgtgctagggctgcccttcctctcgggcctcgcggcggggggagacgccaaggacctccgttttgacctctccaccgccttcccctctgtcccggcgctccgcctctcataccgccccaacgaacccctccagccttttgccctctccgtccgcacggggtcccctatccgcgccccattcgccctcgccgccgaattcaacctcacctcctccaacccgcccgccttctcgctcctcttcaagccccggatcggggacttcgccgtcgcaagctccgtccactccccgccgacaccgccgcccacatccactccgcccccgctagcgatcaagatggtcgacctcaccaccaacagcgacgaccacgactgcgaagcacacggtaacgacctctccttcgccgagaatgtattcggggcgaacgtggcggccgccaccgggacgaacggcggcggcgtaggcgcgctgctgtccgggatgcggctcacgaccaggagcgtgctgccactgtggagtaaagcgagcatgtggttccagtgggggctgcgcgtgccgccggagatcaaggccacgcttgcagacaacgggtacgggcgcaaggctgggagcctcgccatcagcaagctgccgctgctggtgatgaacaagatcattatcgagcacacgcccaaggtgccttcacagtctgaagcggacaagaagaggaagaaagacacaccaccggcagctgaggatgaagagttctcactcatgaagaggcaactggataagctgaatgcggagagcacaatgctgcgtcgtgcagtcgaggacttgagtgcagagattggagccggcaaaggcaatgatcgtaagctgccaacagcagtgccacctcaacaacatactttagtgtcgaaaccagatcgtcatttccacataaatgcgaaggaattggtagacagtgggacgaaaccggcctcaaatgaagcaagtgaggagttgaagaaggtgcttgagggccgacggaattgttacaccaatccttatgtggtatcatggccactaaacatcatgaagcaagccactacggccatttcattttcagaagtttcaccctttgacactattctacatcttttacagctcatgtggtcttttaagccctgcctctacatggacttcggcctcgcttccgctgtcaccacgctctggacctgcaccgatgtcacgcacctcgtgcacgtgctcctgcagttccgcctcgtctggtgcggcaagctaatccgttatgcccgcgccgtcgccgcacactacgtctgctccgtcaagggcctctgctttgacctcttcatcattaggggtagaaacagagctttcaatgcatgttggaggtgcacgatgtgatcaatattatccatgcttgataaatgatgacaatggtgatggccatgatatatggtcaacattgtattgatctttttccgagttt

SEQ ID NO: 514 - DNA, 1795 bp, Zea mays
agccaggcaaagaggccgaggccgaggccgcgcgcacgatataagcagcaccgccatcgctccacgcttcttggtaggtcgccggtcagcaggagcagcagcggcggcggcggggagaaggctgctaactggtggccggccgttcgccgcgagctccggcacgcctccggtccggcggacggcagcagcagcatgtcttcggccgccccgctgctaggcgacgaggccggcggtggcgagcccgcgccgcggacgccgccgccgccgtcctcgtgggtggggcgcgtggtggacgcggccgaggcgcgcgcgcagctggggttcgcggtgccgatggtgctgaccagcatggcctactacggcatcccgctggtgtcggtgatgttctcgggccagctcggcgacgtccacctcgccggcgccacgctcggcaactcctgggccaccgtcaccggctacgcgttcgtgaccggtctgagcggcgccctggagacgctgtgcgggcaggcgtacggcgcggggctgcaccgcatgctgggcctctacctgcagtcgtcgctcatcatgtcggccgccgcgtcggcgctcgtctccgcgctgtggtggttcacggagccggtgctcctgctcctgcggcaggagcccgaggcgtcccgcgccgcggcggcgttcgtccgcgcgcaggcgcctggcctcttcgccttctccttcgtgcagtgcctgctccgctacctgcagacgcagtccgtcgtgctcccgctcgtcgcctgctccgtggccccgttcgcgctccacgtcgcgctggcgcacctcatggtcaacgtgctcggcctgggcctcacgggggcggccgccgccgtctcggccacgttctgggtctcctgcctcatgctgctcgcctacgtgctgcgctccgacgccttcagcgacacgtggaggggcttctctgccgacgccttcaagtacgtgctgcccaccgtgaagctcgccacgccgtccgccgtcatggtctgcttggagtactgggcattcgagctcctggtcctgatcgccggattgcttcccaactccacagtgagcacgtctctcatcgccatgtgctccagcacggaggcgatcgcgtacatgatcacgttcggcttcagcgccgccgtgagcacgcgggtgtcgaacgagatcggcgcggggaacgtggagagggccaagaacgcggtgtcggtgacgatgaagctgtcggtgttgctggccgtcaccttcgtgctgctgctggcgttcggccacggcctgtgggcgcgcctcttcagcgggagcgccaccatcgcgtcggagttcgcggccatcacgccgctcatggtgatctccatcgtgctggactccgtgcagggcgtgctgtcgggagtggcgaggggctgcgggtggcagcacctggcggcggtcaccaacctggtggcgttctacatcgtcggcatgccgctggccatcctgttcgccttcaagctcgacctgcgcaccaggggcctgtgggcggggctcatctgcggcctcacgtgccaggcctgctcgctgctggtcatcaccgtccgcaccaagtggtccaagctcgccgatgccatgaaggaggagaaggccaactacgtcgcgtagcaaacgcactctacgtctgtactgcctttttttttggggagataaagagcacactacagtacgatcattttagacggcttgccgacgaaaatagatcatatgatgctaaaaatagtctatttttttggtatatagcttatttttggtggcc

SEQ ID NO: 515 - DNA, 1431 bp, Zea mays
atgtcgtgccggagtcgctatgagttcgccgtctaccacaagacttcgtcgcacaagccgtccccctacctcatcgctaacctccggaagcatgaagcgctccagaagcgatgcggccctggaacggccgcgcacaagaaggcagtccggcggctcgactccggtgagggcgtcgtcgacgatgacgatggctgccgctacctcgtctacatcagctaccgtggcctcggcaaccgcatgctcggcattacgtcggccttcctctatgcggtgctcaccgagcgcgtcctcctcgtcgacggcggcaaggacactggcgcgctcttctgcgagccctttccaggaacgacgtggctgctaccgcaagccggctggttctccttctccccgctaagtagactccaaggctacgagggcggctccaaggagaacctcggggacatgctgcagagcggcggcatcaccgtgtccgccgacgggaacgtgtcgtggtcggcgccgcggccgccactgtacctgtacctccacctctccggctcctacggatttcacgacaagctcttcttctgcgacgcgcaccagagactcctcggcgaggtgccgtggctgttcatgtggacggataactacatcgtgccggggctcttcctcacgccagcgttcagcgacgagctcgaggccatgttcccggagaaggagtccgtgttctaccacctcggacggtacctcttccacccgacgaaccgcgtctggcacgccataaagagctactaccacgccaaccttgccgacgtcgaccagcgcgtcggcgtccagatcagggtgttccagaagaagcagccgccacggttcgtgctggagcagatcctgtcgtgcctccgcgacgtgaagctcctctcggggacgaagacggacgcggcaggcggcggcaacggcacgtcgtcctcgttctcgcgcgccgtcctggtgacgtcgctgagctcgtggtactacgaccggatcagggacgagtacggcggcaggatctccggcggcgtgcaccagccgagccacgaggggcggcagcggtggcgcgacgcggcgcacgacatgagggcgctgagcgagatttacctgctgagcatgtgcgacgtgctcgtcaccagcggctactccacgttcgggtacgtcgcgcaggggctcgctgggctgcgtccctgggtcatgcccagggcgccgatgtgggctgccgactggagggaggagctggacccgcgagacatgccgtgccggcgggcagactccgtcgagccgtgcttccacgcaccgtcggcctaccgctgcgcggcggggagggacgtggacctgggcaaggtgtcgccatacatcagacgctgcgtcgacgttaagtacggcataaatcttgtcaatgaaagcagcggacagtggtaa

SEQ ID NO: 516 - DNA, 1505 bp, Zea mays
ttgaagccatcaaggcaacgtacgcctaggagtggagacgacgagagtggaggagggctgctgatgggcggaggagacgaccggagagcggcggcgctccagcgatcctcgtcgccatggagcgtgggcgagcggtggcgggcgcacgccgggatggtcctcgtcatgctcgcctacagcggttaccacgtcctcgccaagtccgtcctcaacgtgggcatgaaccaggtcgtcttctgcgtctaccgcgacctcctcgcgctcctcgtcgtcgcccccgtcgccttcctccgcgagagaagggttaggcctcccgtgacgcctcagctcctcgcttccttcgctctgcttggcttcactgggctgtatgggaacccgctcctctgcctcgtcggcctccgctacacaaacgcctcctacgccgcggctttccagccctccataccagtgctcacgtttctcttggctgccattgtcggtgttgaagcgatcagcgtcttcaccaaggacggcatcctcaaagtcaccggcacggccgtgtgcgtctccggcgccattctgatggccctgtaccgaggcccatccttgatcgcccttcttagaagcatgcccaccgcatggacgagcgctccctaccaccctgctacccccgactggttcacaccagccgtgcccgtgctcgagcagggtgtagaagcatggcagcttggcgtcctgtgcctcataggaaactgcctcttggtggctgtctatctagtcgtgcaggctccagtgatgataaagtatcctgcgagcttatccgtgacagcttactcctattttttcgccacaacctttatggtgctaactggagtatgcgcgactagtggcttacacgagtgggcactgacaaaagccgaggtcatagctgttctgtatgctggaattgtcgcatcctgtctgagctactcgatcatgacatgggcgaacaaagttcttggaccttctctggtcgccctctacaatccactgcaaccagccttttccaccgccctctcaactgttttccttggcgacccagtttacctcggaagcgttattgggggagtctctataattgctggtctctatctggtcatctgggctcgctacaatcaagggcagcgggcgcctacggatggttgtttggaccctcttattattgtggataatccaagaatccacaagacacaagaaagtcccttcgtgtagatcctgaaaaaaatgtgtggattatccacacatttgtataggtggtcttaaaagacagtatacttctatttgttaaacttcacatatgcattcaaataaacaagtggtcaaagattgtagtgaacctaggctctaattagaattgtatgttttgtagaacatttttataggctattcacctatctctagccatctagatcctatcagtcaccctgtaaaaatccatatagtccttcaatcgttggaaacagataaggatccattttgacataagg

SEQ ID NO: 517 - DNA, 1144 bp, Zea mays
gcaaagagccaaagactgccggcaccgctgctagcttgctagcatacttcccctacacgcgcgcgcaaccgcaagcagtcgatcgtcgcatggcgccaggaggcagcggcgagcggtggagcctggccggcgcgacagcgctggtcaccggtggcagcaaggggatcgggcaagccgtcgtggaggagctggccaggctcggcgcgcgcgtgcacacgtgcgcccgcagcgcggcggacctggaggagtgccgccggcggtgggccgagaaggggctccgcgtcaccgtctccgtgtgcgacgtcgccgtgcgcgccgaccgggagaggctcgtcctggacacggtcagcgcggccttcgacggcaagctcgatatcctggtcaacaacgctgcgctgctgctgctcaagccggcggcggagtgggcggcggaggactacgcgcggatcatggcgaccaacctggagtcgtgcttgcacatctcccagctcgcgcacccgctgctcctcaacgcctccgtcgccggaggggcgagcatcgtcaacgtctcctccatcgccagcgtccttggcttcccgcaggaagttatgtacagcgtcaccaaaggaggactgaatcagatgacgagaagtctagctgtggagtgggcctgcgataggatccgtgtgaactgcgtcgcgccgggcgtgatcatgacggacatgggtaaagagctaccggcggcgttggtggagcaggagcggtcacgcatcccgctgcggcggaccggcgagccggaggaggtggcgtccctggtgtcgttcctctgcatgccggcggcgtcctacgtcaccgggcaggtcatcttcgtcgacggcggccggaccattagtggcgcctgatcgacgacgacggccagctatatattctctattctactgtatttgaatttgttttcgttcttgatcggccatgtatcaccgtcagacgtcagcggcaataatccggccgccgtcagctagcgccatgcaagctgcccgatcatgcaaggtgcagacactgtcgttgcctgcagttctgttcctttttctactatggtttcttgtattcactgcccactggtgatgtttctgtgataacgacttcgacagaggggatacatttt

SEQ ID NO: 518 - DNA, 321 bp, Zea mays
atggcgccgtccatctccgtcggcgccgcggcgccgtcccgtgcagcgggcgcgagcacgaagaagagcgcggacgaggtggagctcctgcggcggcggaacgcggagctggagcgggaggtggcggcgctgcggctggagctgggcgcggcgcggcgccgcgccgagacggcggaagaggccgaggagcggctgtgcgtgcagctcggcgacgccgaggtggaggcgctcgagctcgcgcgcgcctaccaggcccacgtccacgagctcgccagggagctcgccgccgcgcgcgcggccccggcacgcccggccagatag

SEQ ID NO: 519 - DNA, 2559 bp, Zea mays
atgcgccctttgcggcgaagctccgggggccttgcggccctcggctgctgcctcttcctcctcccgctgctgtcccgcggcgcggacatgccgctggggtcgaccctctcgccgggcaactcggcgacgtggacgtcgcccaacagcaccttctcgctcggcttcacggcgtccgcgtcctccccgtcgctcttcgtcgccgccatcacctacgccggcggcgtgcccgtctggtccgcgggcaacggcgccgccgttgactcggggagctcgttccgcctctcgtccaacggcgacctccagctcgtcaacggatccggggccgtgctctggtcctccaacacggggggccagaacgtgtccgccgcggccgtccaggagaccggcaacctcgtgctcaaggacaagaccggcgccgcgctgtggcagtcgttcgaccaccccacggacacggtggtcatgtcgcagaacttcacctcgggcatgaacctcacctccgggtcctacgccttctccgtcgacagggccacgggcaacctcacgctccgctggaccggcgccggctccaccgtcacctacttcaacaggggctacaacacctccttcacggggaacaagacgctcaccgcgcccacgctcacgatgcagaccaacggcatcgtctccctcaccgacggcaccctcacctcccccgccgtcgtcgcctacagcagcaactacggcgagagcggggacatgatgcgcttcgtgcgcctcgacgcggacggcaacttccgcgcctacagcgccgcccggggcagcaacgccgccacggaggagtggtcggccgtggcggaccagtgccaggtgttcggctactgcggcagcatgggcgtgtgcagctacaacggcacgtcgccggtctgcggctgcccgtcgctcaacttccagctctccgacccttccaagccgcgcgccggctgcacgcgcaagctcgagctcgccagctgccccggcaactccaccatgctcgagctcgacaacacgcagttcctcacctacccgccggagatcaccacggagcagttcttcgtcggcatcaccgcctgccgcctcaactgcctctccggcggctcctgcgtcgcgtccacagcgctctccgacggctcgggcctctgcttcctcaaggtgtccagcttcgtcagcggctaccagtcggccgcgctgcccagcacgtctttcgtcaaggtctgctccccgccgctgcccaacccggccccgggcagcgcggcggcgccctcggccggcggctccggcttccgcgcctgggtcgtggcggtcgtggtcctgggtgtggtgtccgcgctggtgctctgcgagtgggcgctctggtggttcctgtgccggcacagccccaagtacggcccggcgtcggcgcagtacgcgctgctggagtacgcgtcgggcgcgcccgtgcagttctcgtaccgcgagctgcagcgctccaccaaggggttcaaggagaagctgggcgccggcgggttcggcgcggtgtaccgcggcgtgctggcgaaccggacggtggtggcggtgaagcagctggaagggatcgagcagggggagaagcagttccggatggaggtggccaccatcagcagcacccaccacctcaacctggtccgcctcatcggcttctgctccgagggccggcaccggctgctggtgtacgagttcatgaagaacggatcgctggacgcgttcctgttcggcgacgcgccgccgggcgggaagatgccgtggccgacgcggttcgccgtggccgtgggcacggcgcgcggcatcacgtacctgcacgaggagtgccgcgactgcatcgtgcactgcgacatcaagcccgagaacatcctcctggacgagcacttcaacgccaaggtctccgacttcgggctggccaagctggtcaaccccaaggaccaccgccaccggacgctcaccagcgtgcgcggcaccaggggctacctggcgccggagtggctcgccaacctgcccataacggccaagtccgacgtgtacagctacgggatggtgctgctggagaccgtcagcgggcgacgcaacttcgacgtgtcggaggagacgcgcgggaagaagttctcggtgtgggcgtacgaggagtacgagaggggcaacctcgccggcatcatcgacaggaggctccccgcagaggacctcgacatggcgcaggtggagcgcgcgctgcaggtgagcttctggtgcatccaggagcagccggggcagcgcccgtccatggggaaggtggtgcagatgctggatggggttatggagctcgagaggcctccgcccccgaagtcgtcggacagcttttttagcaccaccacggccagcggcggcaactccagcatggtctcgacagtcgcctcgtcggcggcgcccccggtcgcgccctcgacgtcgccgaacctagagcaggagatggcgttgggacgctccgagtcggctaggaaccgtgaccgggtgacgcggcagctgctgtcgccgcagccgtacatgacgatgtaa

SEQ ID NO: 520 - DNA, 420 bp, Zea mays
atggcctatgtcctggcatgtgcagcagatcagagagcggggaggaagaaaaagcgatcgatggcgtccaactacgtggacacgacgggcgaggagggacggttccacggccctcacagccacagcaccagcacgaccccgacgggcggcgcggcggcggcggcggcatcgccgcgcaacttccggcgcagcttctcctccgcgtcctccgcgggccacagccacggcggcggcggcggcggggccaagtgcgtgtgcgcgcccgcgacccacgccgggtcgttcaagtgccggctccaccgcaccaactcccagggccacggccacggccacccgcacccgtccccgccggcctcccccgccgcgccggcgcagggcgtctcgtcttccgcttcctcccgcaccgtcgaggccctgtga

SEQ ID NO: 521 - DNA, 2563 bp, Zea mays
gctctagctcgagcgccatggccacgtctcgctgcggtaaacagcggcagccgctcctccactctcccacgcccgcagacgccaacggtggcggcgcagccaagaggcgcaggttcgtctcgttcctcgccgtcacggcagctcttgtcgcgtcctaccacctcctcgtgccaaccaattcgtcgcactaccacgcactattcctctccctcggttccaacgccaccgcggcggcccacctacgcgcgctcaccctccgcccccacgtcgctggcaccgaggccaacgcggccaccgcccgctacgtgctccacgccttctcctccctctccttcccagcacacatcaccccttactcggttctcctctcctaccccgtccaccgctccctctccctcgccgcggcgcccggcctagccgccaggccgttctccttggtgcaagagacctacaaaggcgacccgtacgctgaggccgccgcggaggtcctcccgacgtacttcgcctactcgggatccggctccgtcaccgccgaggtcgtctacgccaactacggccacaacgaggattatgcttacctcgcctcccgcggggtcgacgtcgtgggcaaggtcgcgctcgtgcggtacggtgacatccactgcgaggacatggtgcggaacgcgcgcgccgcgggcgccgccgccgctatcgtgtacaccgatgccaaggacttcggcgggagcgcggcgaagggggagaagcgcaagtggttccccgacgcgcggtggctgccgccgacaggcgttcaggtcgggaccctgtactacgggaacggcgatccgaccacgccgctgtggccgtcgtgcgcggctggggacgactgcgagcggctgagcatggaggagctggacggcagcgaggagatgccgggcatcccggcgctgccagtgtcggccagggacggggagacaatcctcaaggcgatgggcggcgatgtcgcgccacccaagtggcagggcggcgacggcgcgcccgtgtaccggctcggccccggcccggccgtgttgaacctcacctacattggaaacgagactttagcaacaatcgaaaatgtgtttgcggtgatagaaggaaaagaggagcctgacagatatgtgatcataggcaaccatcgtgatgcttggacatttggagcagttgatcctaacagtggaacagcagccatgcttgagatcgcggagaggctgtccaagctacaagcgaaagggtggaggcctagaagaacaataatcctatgcagttgggacgcagaagagtttgccctgatagggtctactgaatgggccgaggagaacatggacactctagcttcaagagctatagcttacctgaacgtggacatatcagtgtttggtcctgggggtcttatgccccgtgcgacccctcaacttgatgaattgatcaaagaagcaagtaaaatggtaccagatcctgatgaaccatctcaaaccttgtatgacaccatgatgcgccatcatccaccgatcactagagtggctggtgctggaacagattttgcagcatttgtccagcatataggagtcccgtcactcgacatgtcttatgggctgtttgaagaataccctgtttaccactcgttgtatgatgattatgtttgggtggagaggtttggagaccccttgttccacaggcatgttgcagtggccagcgtttggggtctgattgcactgaaacttgctgacgacgagatcatacccttcaattacgtctcttatgcctccgaactggaggagtgcacaaaagatatcgtagataaatgtaaaggatttcctgtcagtttctctcctttgcagaactccatcaagcagctcgagagtgctgccaccaaaatttacaaagagaagaagttgctgcaagcagaaaactggagcctaaagacaagtaagtatacgctgaaagtcagggagataaacgaccggttgatgatggccgagcgagcgttcaccaaccgagaaggactggtcgggagaccatggtacaagcatatgatatatgcatcatcggatcaagacgactgggggaccaaagccttccctggtatagtctcggccatggacaaggctaagaagtccaacacaaccgagacgtggcgactgctgcagcacgagatttacagggttgccagggctgtgtccaaggcttctgcagtcctggatggtaaactaacatgatgtgcacgtgcactgcagattttcattctattctacatagatcgaagtacccgatggattcagtttccatttcgtttcttgaaagctgaagtgcgtggaatacctgtcaggcatcattggataattgtgtaaataatgaagaaatatgctcaagttagtgtcctatgaataaagaatagtggaatcatctctcacgatgattcccttgagagtatcgccaatcattttcctgggagttgcatgttgttcttgctctcgctatctcggcgaccgctgcaaattgagcgtaccatctgtgtataaatatatctcatctatgaggtgtggag

SEQ ID NO: 522 - DNA, 2174 bp, Zea mays; identical to SEQ ID NO: 503

SEQ ID NO: 523 - DNA, 1152 bp, Zea mays
gccgcagtttgccgctctcggcactcgttcggcttcctctcttctctttccggcctatcagcagtcagtttctctcgtctgtgctgatggcgtccaactacgtcgacaccggggcggaggagggcaggttccacggccaccacagcacgacgccgaccagcgcggcggcgtcgccgaagacgctgcggaggagctcgtcgtccgcccacagccacggccacgggcccaagtgcgtgtgcgcgccggccacgcacgcaggctccttcaagtgccgcctccaccgcagcagctcccacggccacggccacggccacggcagcaacccggcgtcccctccctccccggccaccttcgccgctgcgccgccgccggccgcggccgcgtcctcctcccgcaccgtcgcggcgcagtgacggcgccccaagaaacgccgacccagcagcagtgaagagaggagaagagaagagagaaacggcaaaagggaaaaaggaaaacacactctctctgttattatgcgacacgagaaagggagcttatttgttcctcccttcatcttcacgtacgccaacggcagaatttcccatttcgtttcacttcctcctccccccctcgtcttttaaccttttttggctgagatatccatcgattctcgctggaatggtcttcccctccttcggtcagaagaaaccctccctggttgtactgtactaggcaatgcgcatcctgctagatcgcctccgctgaaatggaaagcgtatgtgtgatggtgacatgaagttcacttgtgtaattattaccatttcagtaaatccatgcttcttgcaggagttgtgatcttggtggtgggtctgctgattactcttccaccattccgtcgtggaggtcttgaaattgcgtcaattattcgctataaacaaggatgactggccaggaaacagtaacagtggaccgagatccaaaacaattttggatggtaaaacgtagcaatcacacgacctgcttagcactgaaacgctgggattctttgttgaacgtagcaatctcacgacctgcttagcactgaaacgctgggattctttgttggttcggttcatctcacctacaagtctggtctgctctgtcagtagtaaagttctgtctggcacggattgg

SEQ ID NO: 524 - DNA, 1027 bp, Zea mays
ataccagagcattagacgatcgtactttgtgaggcgctggtctcttgcacagactcggagcaagataggcctagctggttacaagccaagaacaagtagagcggtagagggaaaatatatctggagagggaaacaatggcgggcgaggagggtcttaaggtcctcggcctgcaggtgagcccgttcgtgctccgcgtgtgcttggcgctgaacatgaaaggagtgagttacgagtacgtcgaggaggacatatccaacaagagtgagctcctgctcaagtccaacccggtgcacaagaaggtgcccgtgctcatccacaacggtaagcccatctgcgagtcactcgtcatcatgcagtacgtcgacgagctgttcgccggccggccgatcctcccaaccgacccctacgagcgcgccactgctcgcttctgggctgcctacgccgacgacaagttgtttccagcgtggtacggcatggtgaaggcccaggcggaggaggagagggcggagaaggcgaaggagacgctcgccgccatcgagcacatggaagtgaccttcgccaagtgctccggcggcaacgccttcttcggtggcgactccatcggctacgtcgacatcgtgctgacgtgctcggctccttcttgttctggttcgaggcggtgcgcagggttttcgacctggagatcattaacgctagcaagactccgctgttggctgcgtgggcggagcggtttgtagggactgtagaagcgaaggaggtggtgccgttgcccacggcggacatggcggtacagtacatcaataagcttcatgcccccctgccgccgccatgagttcacaatgagtcgtgtaagtgtaaccaagcagggaaaaaggtaaatggtgcggtgctttggtccaaattccaaccgaataatgttcaaagcttatattgataggcttgggttgttgtcatcaaatattgtggttcagtcgtctcctctgcaataaatataaatatgattattactttctttgccgtaaaata

SEQ ID NO: 525 - DNA, 1763 bp, Zea mays
ggcgcagaagtcgaccggcatcacagttcacatccgacaactaatcagtccatcgcgttcgcgtccacggtcagttgccggcgccatccctgcccctgctcacccctccccgcctggcgtccacgatcggcgacggcatgtctcgcgacgcccatctcggagtcggagtcgagggagacgcagccgaggaaaagaacgccgccgctgacggcggcgaaggagtcgggttcaggtcaggcggcggcggcgggcacaagctgtccctggtgccgctcatcttcctcatcttcttcgaggtggcggggggtccctacggcgcggagccggcggtgcaggccgcgggcccgctgtacgcgctgctgggcttcctcatcttccccttcatctgggccatcccggaggcgctggtcaccgcggagctctccacggcgatgccgggcaacggcggcttcgtgctgtgggccgaccgcgccttcggcccgttctcgggctccctcatgggcacctggaagtacgtgtccagcgccatcaacggcgccgcgttcccggcgctgtgcgccgactacctggcccgcgtcgcgcccgccgtgtccgggggcggggcccgcgtcgccaccatcgtcgccttcaacgtggcgctcacgttcgtcaactacacggggctcaccgtcgtgggctggtccgcggtggggctcggcgtcgcctcgctctcgccgttcctggtcatgtccggcgccgcgctgcccaagatccgcccgcggcggtggcgcgtcgtcgccgccgagagggactggaagctcttcttcaacacgctcttctggaacctcaactactgggacagcgtcagcaccatggccggcgaggtggagcggcccgggaagacgctccccaaggcgctcgtgtccgccgtctccatgacgtcgctcggctacctgctgccgctcatggcggccaccggcgccatcgacgtcgcgcctgaaagctgggggaacggcttcttcgcagatgccgcaggcatgatcggtgggcgttggctcaagtactggatagaggtgggcgcggtgctgtcctccatcggcctctactcggcgacgctgagcagcgcggcgttccagctgctggggatggcggacctgggcctgctcccgcgcgcattcgcggcgcgcgcccccgtcttccgcacgccctgggtcagcatcttggccaccagcgccatcatcctcggcatgtccttcctcagcttcaacagcatcgtggcggccgccaacttcctctacagcctgggcatgctcctcgagttcgccgccttcgtctggctccgcgtcaagcggcccgcaatggcccgcccgtaccgcgtccccgcgcgcctgcccgccgccgtcgcgctctgcctcgtcccctccgcgttcctcgtcttcgtcatggccatcgccggctggaaggtgtacgccatcagcgccgcgttcaccgccgcgggggtggccgtgtactacctcatgcgcttctgcaaggccagggggtgcctcaggttcagcgacggcggcgaccaagggaccacggcggtgtaccaggacggcagcaacgcgggcgatgtctgaatgatagatagactctttgtgccaaaagcactatacgaatttgtattgtaggctagtgttttgtgattaggaattagtggttccggggaaaaggattcatgctccctccagtttctgctcgtgacatcttgcttacgtgtgtgctccaactctccatacttgttg

SEQ ID NO: 526 - DNA, 1891 bp, Zea mays
gacgaccggaagcaaaacagccagccaaccaaccaaccagaccagggatggatggtgcgcaccaagaaagggggcaccgcaccgagccaatgatctgcaagaagagaggtaggatttaggcacggcacctatagcccctgacgagagagagagggagagagatttggtcttggataagattctgaatctcccgcaacccgtctcatcgccggagtggagttccaggcgagtgattatcgagccagtaagccatttgcaagcactgaactgaaccctcagagcgttgttgcgatggaccaaatcgctacccccgacgaaacagcacatgcctctgcaccttcagttcataagctgtttgatgctaaattaggccaccatagcgtgatggatggcaccttggcatccacgagtcagtcatcaaacatcaagacccagctgatccggtcatcaagcttgtcaaggagcatatcagttaaccttgagaagaggagccctgaatctgatcctgaaagcccacagtctcacgtctcgcatcctaaatttgcagaacccatgttctcgaattcttcgacgttctgcacaagcttgttttcgtcatcttcgacaacagagccatgccgtcaaatgggcactttacctttcctgcctcacccccctaagtgtgagcagcaggtttcagctggtcactcatcgagctcctctctgcttttaagtggtgataccggtttagatgtggctgaacagtcagatgatctgaacgacttgctcaatctttcgggagatgcttctgatggcagcttccatggagaaaacaatgccttagcttttgacgaacagatggaatttcagttcctgtctgagcagctagaaattgccatcactgacaatgagaagaatcctcatttagatgacatatacggcacaccaccacagctgtcatcacttccagtatcatcttgctccaatcagaatctagggtcaccagttaaagtccagcttagctcatctcagtcatcttctagctctgcaacagctaacaagtcaagattgaggtggacacttgagcttcatgagcgttttgtggaggccgtgaaaaagcttgaaggtcctgaaaaagcaactcccaaaggtgtgctgaaactaatgaaggtagaaggtctaacaatttatcatgtgaagagccatctgcagaagtatcggcttgcaaaatatattcctgagcctaaagacgataagaaggcttcctcggaggataaaaaagcacaattaggaaagggcagcattgattcaagcaaaaacaagaatttacaagtggcagaagctctaaggatgcaaatagaggttcagaaacagcttcatgaacaattagaggtgcaaaggcagttgcagctacggatagaggaacatgcaagatacttgcagaaaatactagaagagcagcagaaggccggcaatgtgccactaaaagctccaaccaaagcacaagcaacaaagtcgtcacctgaatcgacgtcagacgagagaactgaatccgaggtagacaccatttctccgcggccacccaagaacaggaacccgggtgtagacgcagaatgcaaatcgccgggaaggatcaagcgaacgaaggttcaggctgatcttgaaaacgagggcctgtgttcatagcgagggctcatgttcgtagctgtgcgggctcgccagtgattttctgaacatttgcacttcccgttttagttcaggagctatttgttactgtttgtaacttgaacagccgtagtatctccagcgatctgttgatatcttggcgtgaattggacttgacatcttagccattgtattatatagtaattcgcctttggaatggaaatggaataggtttatgtttgaatcc

SEQ ID NO: 527 - DNA, 1799 bp, Zea mays
atgccaatggcggccgcggccggcgcgggcgagcccggtccgcgctcggaggcgtccggcttcggctctggctgcaaccacctgcggccgcggcgggggcctccacccccgtccccgtcccccgcggtcgggaagccgctcccgtccggcgcggtgccgcgccatgcgttcgtgttcgacggcgagggcggcttctccgaggcaccctggggccttgcggtgtccggttcgtcgcggaccggggagttcacgtggcaccacgtggagctcccgcgctccgcgggcgccgcggcggccaagccgctccaccacgcgcaggcgctcatcgagctcctctgcccgccgctcacgctgcaggagatcctcgcgttcgtcgccacgggcccgcactgcgcctcctcgggcgacggcgcgctcctgctccgcgtcagcgcgccgggccccgtcggcagcgcgtacgcgctccgcctcgccgcgcgcgtcaccgagagctccgtcgtcaccgtgtccgtcggcggggtcccgcgcctcgcgttcgggaccaggcaggcgtcgctcctctcggaggttccgctcggcgtcgccgcctcgctctccgacgagggccatggcgggggccgcgccgtcgacggcggcgtgatcatcgatgagcgcctgctcgagtcgctgctggccatgaaccacgcggacggcgcgcacacggacaacccggtgccgcggacggtgtccaacctcctcgtgcacgtcctcggcacgcacgtagaccacgtccacgacattgtcacgcgcctcgagatggacctggacgccgtcgagctgcagctcgacaaaggtggtcactttttgaggaagcttttgctggatggcaggagattcccaaaaatgcatctggatctacagcggttgcttcaggttgtttctcactgtgaacaagtattcccccgcgtgaaggaaaaatgtgcgagcaagagttggttcgcaacaggagatatagcagcccttgaagatctgataggtcgtctcagaaggctcaaagaaaacctagggttcattacaaatagaatcaccacacttcaggctagtctggacagttggcaatcggagcagataaacaaaagcttgtactacctttcatttctctccataatattcctgcctctttccattgtcactggagttttcgggatgaacgtcggtggtgtgccgtggacagggcagaacaagaaccctaaaaaccgggatggcttcatgaatgtcatgctaatatgtgttgcaatcttgttacttctgttgctgtgtttcttgtttccttcattatattctcatgtgacgtcatggagaacccgccgtgagctgacccggagcaactctcagaacagaagacatctgaaactcttcaaaggtcacaaggaaggttacatgcgcctatgacgacaatacagttgcaaactacggtgtccatttcagctgtaaggtgattgtcagtgatgttgtaagtgtaagatttgtggggaaagatcctagatagccaacacatgtacaggtttgaaggagaccctccatggctccatttgaggttcataccttgttcattgcttagtttgtttttgttgtagattcatggctgtcactgcaccttttatttattctgaaaatgtgttagttcttcaatgaagaccacccacgacaatttgtcattgttgttccaggtggacgtgtttcatagttgtacgcagcgaattcctgcctgttttcagcgtattgaaataaatagtcggagcaacagctatggcttttat

SEQ ID NO: 528 - DNA, 822 bp, Zea mays
atggacgacgacgacgactccccgcctcatgagtcggcggcggcggcggcggcagacctatcgctgacactggcgccggcgccggcgctggcgcctcccgcgccgcctccggcgctgcccgccgtcgcctccgacggaggcgtggcgacggcgcgcgtggacggcaaggacgtgcgcctgttcccgtgcctcttctgcaacaagaagttcctcaagtcgcaggcgctcgggggccaccagaacgcgcacaagaaggagcggagcgtcggctggaacccctacttctacatgaccccgccgcacccgcagcccaatgcggcgccggcgagccccaccgccccgccgcccgcctacgcggcgggcggcctcctccccgcgccgtacgcggcccacgtgtacgcccccgtgccggcggcgccgccgccgccgtcgttccccatcgcctcgcacggctccagcggggggctgcggtactacgcgccgccccacgaggcggcggcggcggcggcggcggacgcggggacgggggcgccgacgaccgcgggcgtcgtgcttgccccgcgcgcgcgctacgccacggccacgcaccagcagcaggcccagcagcccggcggcggcggccgcgatgacttgatcgacttgctcaactggaggaggggatcccacggcgcaccggccgccgccgccgccaccgcctcgccggccagcaccaccaccactctcaccacctcatacgccggcgcccccgacggcggcaccagcaccaacgacgacgacgacgctgacgacgccggggagctcgacctcaacctcagcctctag

SEQ ID NO: 529 - DNA, 717 bp, Zea mays
atggcggcgccgcctaccgtgcggggctacgggccagcgtcgccgtcgtcgtcggtggcgctgcctcgggcgcgatcgcgggtgcctgcgtcgctcgtgcccgtgccgacgcggcgggcgccatcggtgcgcctgcgtgcggcggtcgcggacgtgccccgcggcggcctgcagctccagcggcgggaggtggaggtactgtcggggaccgtgttcggcagagaagaggatgaggtgttggagaaggtcggggaggagaaggtggacgggtggatacgggagtcgatcgcggagatcgtgcggcacataggcgaggcgccgttcctggtgcacctgttcagcagcggcgacggcgacggcgagcacgtgacggtgcggcgggagaccgcggcgccggagagctggccggacgtgcggcgccggtgggggatgggcgggcagcggaggccggacggggtcatcctggtcgagcaggtggcggccgtggccgtggacggcggcgcctcggcgtcggaggcggcgcggcaggtgtgggggctggtggtgcaggcgcgcggcatggagcacgcctcgtgttacgtgctcgacacctgccgcgtgcgctcgtcggccgggttctgcacgcacttctgcctcgcgcgggccaagtgcttcggcgaccccgtcgagctccagctccgcaacgcctggctcaaccgcctcgccggccgccgatag

SEQ ID NO: 530 - DNA, 1488 bp, Zea mays
atggggtcggtgccgccggcagagggggacaggcgccagccccagcagcagccacacgtggtgatgatcccgtacccggcgcagggccatgtcacgccgatgctgcagctggccaagctactccacacacgcggattccacgtcaccttcgtcaacaacgagttcaaccaccgtcgccacctgcgcgcgcgggggccgggcgcgctccacggcgcgccggggttccgcttcaccgccattgacgacggccttccgccctccgacgccgacgccacccaggacgtccccaagctctgctactccaccatgaccacctgcctaccccggttcagggacctaattgtcaggaccaatgccgaggccgaggccgagggacgccccgccgtgacgtgcgtcgtcgccgacagcatcatgagcttcggcctccgcgccgcgcgggagctcggtctccgctgcgccacgttctggaccgccagcgcctgcggcttcattggctactactactaccgccacctcgtcgcacggggtatcgtcccgcttaagaatgaagcgcagctcaccgacggttacctggacaccgtcgtcgactggatcccttgcgcgcccaaggacctgcagctccgggacttcccgagctttgtgcgcaccacggacccggacgacatcatgctcaacttcttcatccacgaggtagaggcgatgtcgcaggcgtcggcggtggtcatcaacaccttcgatgatctcgacgcgacgctgcttcacgccatggcgaagctcctgtcccggcccatctacaccgtgggcccgctcctgctgacggtgcgaaacaacgtccccgcggacagccccgtcgcggccatcgggtccaacctatggaaggaacaagaggcgccgctccggtggctcgacggccgcgcgccgcgctcggtcgtgtacatcaacttcgggagcgtcacggtgatgtccaacgagcagctggtcgagttcgcgtgggggctggccaacaccggctacaccttcctctggaacgtgcgcccggacctcgtcaagggcggcgactccgccggcgcggggctgccaccggagtttctggccgcgacggagggccggagcatgctgtcgacgtggtgcccgcaggcagaggtgctggagcacgaggccgtggggttgttcttgacgcactccgggtggaactccacgattgagagcatctgtggcggcgtgcccatggtgtgctggcccttcttcgctgagcagcagaccaactgccggtacaagcgcaccgagtggggcatcgggatggagatcggtaatgacgtccggcggggcgaggtgaaggcgctcatacgggaggccatggagggggagaaagggcgggacatgcgccgccgcgtcacggagcttaaggggagcgccaggacagagcacacgcagttggcgcaccgtacagtctacaggacctgtccggtgcaccaccggacagcctag

SEQ ID NO: 531 - DNA, 2134 bp, Zea mays
gagagagcacacacgaccgaggacccgacgggtggagcatatatgagacgcgtacggggggacggtcgctgagctgagctcatggtgatggggaggccaagcaacagccacgggggcgggggcgacgaggagcggctgcccctccgcggcgtgctggagacgtccccgtcccatcacgccgcggtgcaggccaaggacaaggaggcgaggcgcgggggcagcaggctctggcgcgcgtccgtgcgcgcggggctgctgctctgcctgctgaccgtcccggccgtcctgctgctgctgtggtggcaggccgactcctcgccgcagtgggtcttcgacttcgagccacccgaggaagacgacgaccaagatatacaagacgacatgtcagacgatctatctccgtcgccgcaaatagagtacgatcgtcttctgggcggccttctcgtcgagggttttgacgacaaatcatgcagaagcaggtaccgtttcgcacgctaccacagttcaccgagcataccttctccgtacctcatagagaggctaaggaaacaagaagctctgcagaagaagtgcggcccaggcaccagagcatacagggaagcttcgaagcagctgaaatccggtcagagcatgagcatcaacgccacagacgactgcaactacctgttccttatcatccacgccggcttagggaaccggatgctcgagatcacttcggcgttcctctacgcgctgctcacgaaccggatcttgctcctggaccgttacaaggagatcgcggatcttttctgcgagccctttcctggaacgtcgtggctggttccttcggacttccctctgaacgacgacgagttcggccagagcagcgctgagagctacggcaacatgctgcagaacaaggctttcggtggtggtacggaccgatctttggttggcaacagactccctccctatgtgtacctccacctggacggcaactatggtttccacgacaaactcttcttctgcgaggacgaccagcagttcctgcgaggtgttccgtggctggtcatgaggacggacatgtacttcgtgccgtccctgttcctcgttccagctttccaggacgagctcggcaggctgtttcctgagaaagacaccgtcttccatcacttggcgcgctatcttttccatccgacaaatggcgtctggtattcggttacaagatgcttcaggtcctacctggccaaagcggaaaaaagggtgggaattcagatcaggatatatgaaaccaaaggtatcttgcagagaaacggcccgttcccacacattctgaaccagatcctctcgtgtgctcaaaacgagaagctgcttccagaaatcagtatggcagagggagcagccgatgggactcggaataaccgaacagcagccgggagtgggactcggaacaaccggacgatcgctgttctaacgacttctctgagcgcttggtacagcgagcagatccaggagaagtacgacgagcagtcggctgttgatggcgtgtctgtcagagtgttccagccgagccacgaggagtaccagaggtcgaggaacaaggggcacaacatgaaggcgcttgctgagatctacctattgagcatgaccgacgtgctgatcaccagtggcttttccacgttcgggtacgctgctcaggggctcgccggcctgaagccgtggatcatgcttaagtcggagaaccacgtgacgccagacccaccgtgcgtccgcgccatgtccatcgagccgtgcttccatcaagctcccttctacgactgcaaggcgaggaaggacaccgatttgggcaaggtagtgccttacgtgaggcactgcgaggacgtgagctgggggctcaagattgtagatcaaactcatttgtagtgtagctgtaatctggtcaggactcacggcagacttgcttgctaactagggcagaactattgttattcttattcttaatctgcgaaacacaaaggaaccatacaaaatgtattctttccctcctgtatttgatccaagtgtagatagttgatagacagatccattaatctgttcatcctctgatgtcaaaaggaagagaaacatgtttactatatatcatcgctcatttggc

SEQ ID NO: 532 - DNA, 1419 bp, Zea mays
atgtctgaaaaactggcatcaaaagatatcaatgaatgtaaaacacaacacatttgcaaagagaacgaggtatgcaacaatgttgtagggagctactactgcaccaattgccctgataaaacagagtacgatgcagcaacaaaccagtgcaaagcaacaaaacagctgggtcttgttttgggtgtgattattgggctttgtgttggctttggcattctagtatcttgcttgggcgggatgcttgtcatccgtagatggaaaagggacattcaaaagcaactacggagaaaatactttagaaaaaaccaaggacttctcctagaacaactaatatcatctgatgagaatgcccgcaacaatacgaagattttttctctggaagagctcaagaaggctacaaatgactttgatacatcacgcatacttggacgtggaggccatggaatggtttacaaaggaatcttgtcggatcagcgtgtggtagcaataaaaatttccaagatcatggagcaaggtgaaatcgacagttttatcaatgaggtcgccattctttctcagataaaccaccgcaacatagtacgactcttcggatgttgtcttgaaactgaggtcccacttcttgtgtatgatttcgtatctaatggttctttgttcgaaattctccatgccgctgaggcaagcaacgatttccagttgtcttgggacgattgcttaaggattgcattagaggctgcaggggcactttattatctccattcttcagcttcagtctcaatcttccaccgtgatgtcaagtcctcgaatatacttttggatggaaactacactgcaaaagtttcagattttggtgcgtcaaggttggttcctattgaccaaacccatgttgttacgaatattcaaggcacttttggctacttagatcctgagtactaccacactgggcaactaaatgagaaaagtgatgtgtatagctttggagtggtacttgtggagctactccttcgaaagaagccggtttttacaaatgagactgggacaaagcaaaatctgtccaactatttcctttgggaaaagaagatgaaacctgttacagagatagtggcttctcaagttctcgaggaagcaacagaggaagaaattaacatggttgcctcccttgccgagaagtgcttgagactccgtcacgaagaaagacctacaatgaagctagtagaaatgactctacagtttttgcgagcagagcggttgaactcaagtagtgatgttcctgcgagcaagcaagaggtggaagaacttttgggtacaagcacttcctattctgacactttgctggacaataaagctgctacaacatcccaacaatcaaagggatattatagtttggagcaggagtttgcttctactactctaccacgttag

SEQ ID NO: 533 - DNA, 1504 bp, Zea mays
cgctgatactggctgccgcatgtctagattggtttggtgatgctgatgccggtgccgcatgtctatattgggtaggtgacgctgaggcctcgttccccaatcagacttgttcggcctcttcgacggcgtgcccgtctccccgagctcattcgccatgccttcctcagcctccgcgagaggaggacgagggctcctcttgccggcggctgctgaggcggttgtggtgctaatattgggtgcagtggcgccagcggcgggttgttatccgcgcgtgttcagcttcggggactcgctggccgacacggggaactacccgttcgtctacggcaacgactctgggtctggcggggccgcgctccggccaccctacggcgagaccttcttccaccgcgccaccgggcgcgcctccaatgggcgcctcgtggtcgacttcatcgcggacacgctgggcctcccgttcgtgcgaccgtatctgagcggacggagcgcggaggacttcgcgagcggggccaacttcgccgtcggcggcgccacggcgctcagcccggactttttccgtgcaaggggtttcgacaccatgggaaacaaagtggacctcgacatggagatgaagtggttccgcggcctgctcgacctactctgtcccggcaatctcgccggttgctcagatatgatgaaccaatctctcttcttggttggagaaatcgggggcaatgactacaacggacctcttctttctggagttcccatggagaaaatccgtgccatcactccgagtgttgttgcaaaaatttcttctacaatcagcgaattgattcggctaggagccaagactcttgtggttccaggaaacctcccaattggatgcatcccagactatctgatgatattcaagagcaataaggaagaggattatgaaccacagacaggttgtcttaggtggatgaacgagttctcacagtatcacaacaaggttcttgtggagcagctcaagaagcttcgcaagcttcatcctggagcaaccatcatctatgctgattactatggagctgctatggaaattttcctttcccctgaacaatatgggatcgaatatcccctagtggcttgctgtggtggagaaggaccctacggtgtgtccccatctacaggctgtggattcggagaatataagctgtgcgataatccagagaagtatggatcatgggatggcttccatccatcagaatctgcatacagggccattgctatgggcctgctactaggttcctacacaaggccgtcgatcacttccaccaccacttcatgtccacagcttatggagctcggctcttctgctgaatacaaacccctctacgacctgtagtaattttgtaattatattttattgtgtgtactccctcgcccagttctatcagtaccattttgtaagtatttgtactttgtaacttgtaactaataacttatcaaactagctactacatatttgttagagtgcacggtt

SEQ ID NO: 534 - DNA, 1386 bp, Zea mays
atataccctttcgtctccgcccagcagcaacggcacccaccgaatccgcccctccctctttccgttccgcctcgttgcgctcgctctcgctgcgccgcccgccccacctcacggagctcacggcaacaccggcagggacggaaaaggaaagccgaggaggcgaggagagagagatacaaggcaggcagccaggcacaggcagcccgcggctggctacggggccaaaacccttacgcgcgacgcggccccctcctcttcttctctctcccaccaccgccctccccttgccatttttgccgcaggagccgccgccatccgatccggaagagggaggaggggggagggaggaggatctgtgtcccgattcgattggagctctcgtccccggcggtccaggatggtgcggggcaagacgcagatgaagcggatagagaacccggccagtcgccaggtcaccttctccaagcgccgcaacggcctgctcaagaaggcgttcgagctctccgtcctctgcgacgccgaggtcgcgctcgtcgtcttctccccgcgcggcaagctctacgaattcgccagcggaagtgcccagaaaacaattgaacgttatagaacgtacacaaaggataatgtcagcaacaagacagcacatcaggacattgagcaagtaaaagctgatgctgagggcctggcaaagaaactggaagcacttgaagcttacaaaagaaaacttttgggtgagaggttggaagaatgctcctttgaagaactgcacagtttggaagtgaaactcgaaaagagccttcattgcatcaggggaagaaagactcagctgctggaggagcaactccataagctgaaggagaaggagatgaatctgcgcaagagcaacgaagatttacgtgaaaagtgcaagaagcagccgccgccgccgccgcctatgctgatggctcctccgccgcctccagcgccggcagccatcgatcacacggggccgaaggatgtcgggatggacgtggagacggagctgtacataggattgcccggcagagattaccgctcaaacaacaaagacatgactgcacagtagctgtcaggtcaggtcaggtcaggctagccagcagtgcagagaataatcttagatctgtggtgcggagaactggagatgcaagccaagcccaagccaatcaacatgataaggatcatgagtgtcgcgtcgtgttttacaaacctgtccaccgtccgtcaaaggcacatgcgccagaacgtccgtcagagaacacttaccccctcatctccctctattagctagctgctccggcctgctcatgtcgaaaccttctgttcaagtatgttctcctcctgatgaattccctgcccggcatgcattgg

SEQ ID NO: 535 - DNA, 3345 bp, Zea mays
gcttccaacatccttccaaccagccatacctgcggatcgaactctagccaagcaacagagagggggggagagatgacaggtgtggagccagcaattatcggtgcaatcgctaacttggcggccccggtcctgcctatagccattaaagggatacaaggtgcactgaagaaacggcaagtccgtgacagtgatgttgaaaccctgaaatcccagcttagctacatccagggcatcatccgtgatactcggaagactatcaggagttcccaagacccgtccgacaggcttcaatcctgggctggatacctcagatgcttggcgtacgacatcgaagacctaatagaaggccgccgtgccggaaccatgacaggtgcgaagcttaatggcaagattactatcatccaggatttaatcagatgtgtacagtcctatccggagtttatggcggttccgacgaatgaggctcctagtcaaggcgctgcttcttcctccactacttcaagcacccagggctttccgctggctgatcttgtgggcaagaaggaggacctcgatgagcttctggacctcctcgtccggagacccgacaatgagctggacaaggtcctcaaggtgatggtgatctccgtcgtcggcttcggtggcataggggagaccaagctttgccacacagtgtacacggacgtacaggagagcagaaggttctccctgcatgcgtatgtcagcgctgctgggaaggactgcagcatcgttctggaagagataatcgagcaatttagactgcaagaggatccacaagatagcagtggtggattttttcacagattcgccggagcgtttcctggggctcgtcgtactgaccaagttcatgggttacccgagtatctccaaaggaaaaggtattttgtggtggtggatggcgtggagtctgaagaactggtgagtggcatagcatctgccttcccggataatagtatgggcagtagaattatcatgggtatgaggaccgcagtgggcagggatgcagagagatgtgtgggtcatcatcacaagatgtggccacttgaagacaagcagtcggtggtgtgcttcctaaatgaagcggagcggcggcgacgacgacatgaacaagacgaccactcgtcgttcattaggtttcaggaacaagaccactcatcatcctgtttgcacaaggtatgtgatggcgtaccacttgcgctggttagcgtatgtgaagtccgcagagggtccatcatcactgctgccgttgaagaacaagaccgctggccacacagaatgcccaaggtgctcgaccacagctacgatggtctgcatatccggggtgctgggagctgtccgaaccaatacatcccctatctccaagcctgcctgctgtactttgccatgttcccccgcggcaatcatgtcaagaggggatccctgatcaggcgatggcaggcggaaggcctagagttcggaggcagcaatcaagctgccgaaaacctcaaggccctcgtagaccggaacttcgtttggcccctccatgcgagcctgaatgagcacgccaagacattccagcctcctggagtggtgctcaactacatctcccgcaggtctcaagaggaggaattcatcctcaggtcttgtccaagtggggaacttaatcccaattacagccgccggctttgtctacatcctgccgaggaagaagaaggtgaaccccaacccgtggtcattaccaacggttctgtaccaccacgcctgcgaactctggctgtgtcctgggggcagcaacaggccagcaggattgctgaatgcgagcagctccgagtgctggatctggcgtcatacaatggtctacagccagaccagctagaggagatatgcaagaaactgaagcttctcaaatatctgagcctcctgccagatatcatcactcaagttccaagctcaatgtctaatttgcagtgcttggagacactcgaggtgggggaggtcaatggcagggcggcagttctggtgcctatccaagtcttggaactgccacgcataaaacacctaatcggaaaatttgagcttattgacaacttcaacggactaccaattagggcttatccagatgcactagtaccaaaggcaatcaaggaaagcaacctggagacggtgtcggggttcttcacccgcagaggccaaggatttccgccactcatgcgtcacattaggcagctcaggaaggtgaagatatggttctacagggatgcagaacccaaatacctagcaagctatctcccgaaagcgattacaaaattcctcaggaatgacaacgttcatcgctccctgtcacttgacttccaggatggcccaagacaaacagaaatactgcaggcttgtgtggctgaagctagcggtaatctttactccctgaagctgtcgtccggcacaaatctgagcaggatccaactgtcggttattgccaccaacaagctgactggaatcacaaagctatgcctttcccgctggaaaacgataacgttggatgcagaatttctgaatgagctgaccaaattggccagtctgacgtatctgaagctggatgcagaaacaataaaaggtacgtacgaccaaaacccaacaccaggaggaaataaccaagagaaggtcgtcatagagactgggcacattgcaaatctgcggcggatgtgccttgtggccaggcagacgctgcccgacatacaagtcaagcctacagctctgcaacgactcgtttcacttcatctcatcagtgaaacggacgattattgtccttccgccaacgtcatctgtaaagccaacccccaggacgacaacgagccggcgccgttcacgagcctccaggaagtctcgctgaatgctacggtacccgaaaatttaagggattcttggcgtaatgctgcaagggaccatccaaagaggccacgaattctcttcatccaacaccctcaccgtgcgggataacccctatatgttcttcgtttgaaacctccaagttcgatctgtcactttctccacgcagtgctcctgcttcttcaagattgattcgtctccttatatattatacttgcctccaccttcattcaaataatgtttgattgtattctttttgtatactgcggttttgtatccgttgaggtaatttttcaagctgttgagcactaaaaatagcacgaacggtctggccctgaggccggacggtccgtggtcctgacggtccgcgcctgtgggccggacggtccgctcaagcgcagaacagattatggtttcgagtttcttactatgtttgttggcgagaatatcgagataagctcg

SEQ ID NO: 536 - DNA, 1592 bp, Zea mays
gtatctctgaattttacacgcactagtggcaaatttccaaacgcagtcgcttgagcctgttacatttttcggccaagtccaaagacttcgtggccagccagagacttcgatcgatctacggcgattgcacctcacgtcggaagcagcaccggagctcgcgcgtccaggcgccggccaccatgacgttgacgacggtcgcattcaccgtgcgccggggggagccggcgctcgtcggccccgccgcgccgacgccgcgcgagacgaagcgcctgtccgacatcgacgaccaggagacgctgcgcgggcagatgccgttcctcttcttgtaccgcggcggggtgcacgtgcgtgccgacgacgacgacccggcgtgtgtgatccgccgcgcgctcggcgaggcgctggtgccgttctacccgctcgcggggcggctgcgggaggtggagggccggaagctggtcgtcgactgcaccggcgagggggtgctgtttgtggaggccgacgctgacgtgcggttggacgaactggaggcgaccgggctgaggccgccgttcccgtgcatggaccagctgctgttcgacgtggacggctccagcggcgtgctccactgccccctgctgctcatccaggtgacccggctgctctgcggcggcttcgtcctcgcgctccgcctcaaccacaccatctgcgacgccatcggcctcgcccagttcatgtccgccgtggccgagctcgcccgcggcctccccgcgccgaccgtggcgcccgcatggtcccgcgagctcctcgaagcgcgcaacccaccgaagccggcgttccctcaccgcgagttcgacgtggcgccacctccgccacccccaccgccgggcgacatggtgacgcggaccttcaccttcagcccagccgacgtcgccgcgatcaagcgcgccctcccgctggctctccgcgaggcggccacgaccttcgaggcgctgacggcggccctctggcgcgcgcgcacggcggcgctggcgccccctcacgacgcggaggcgcggctggtgtccattgtcagctttcgtggccttcccgagctggcgctccccgcgggttactacggcaacgcgtgcgtgcccgtggccgcgctcaccaccgcgggggcactgctggcggggtcgctgggcgacgcggtggcgctggtgcgggggaccaaggcggcggtcaccgccgagtacgtgcggtccacgctggacctgctggtgctgcgggggcggccgtgcgtggcgctcgcgaacctgttcctcgtgtccgacaaccggcgcgcggagttccaccggctggacttggggtggggcgtgccggcgtacgggggtcctgccgtggcgctcttcgggttgagcttcttcgtccaggcagggaacggtgacgacgtcgccgtgttgatggcgctgccgcggccggctatggaccacttcgcgtcggaagtggagacgttgttgaaggcttagttgggtgttcttgaatcttgacgagcgagcgagagagcggcagagcgccgcctgttcttgctaatgctaactgtcttcgctcaaatttgtcgtctattcgtcgcc

SEQ ID NO: 537 - DNA, 2792 bp, Zea mays
ggccagctctcttttagtagagacactctgccacagcgtagcctagcatagcgtccactagctagctagctagctagcatcagtcatggaggatggcgccgagaaggcgacgacaccggattcttcttcttcgcaagcggcaccgccagcgctgagcgcggtgtacgtgaacaggcgcctcgtggcgggcaaccgcgccatggccgccgtccacgtcgcgctggtcgccacggtcatcggccagcgcgccctggcgctgctctctgctggaaccagcagcgcgtcgcccgcgtcccggtccctgcaggtgcagcacgtggccatggcgctggccgacctgacgctgctgttcgtgtgggcgctgtcgcagtcggggctgtggcgtcccgtgacgcgcgccgcgttcccgggccggctgctggcggcggtgccccgcggcgcgctcccgcgcgtggacgtgctggtggtgacggccgacccggacaaggagccgcctctcggggtggtgaacacggtggtgtcggcgatggcgctggactaccccggcggcaagctgagcgtgtacctgtcggacgacgccgggtcgccgctcacgctgctcgccgcccgtaaggcctacgccttcgctgccagggcctgggtgcccttctgcaggaggcactccgtgcagtgcccctggccggacaggtacttcgccggcgacgacgacgacgctgacggcgatcggcggcgggaggagctcgcggaggagagggcaagagtcagggtacatgtctgtctgtctgtctctagtgttttgcttttgattagactattttttttcttttccggtccctctgggcgtgacgtgtgtgatgacgtcaaagtggcacatcgggatggagtctccaacacactccaaagtccaaactccaaagtgccgtaatcagtgtcacgtggaagtggaacaaccattttcgtcctcatgcattgcatgcatgaaactatacgagaagttgaaagcggatatagaggcggctaagaatgacgagactatttctgggagctggtcaaaagacaaacgtcagaatcacgatgcttacgtggagatcatcgaagacggcgacggcgttgaggagattccggcgctggtgtacgtagcccgcgagaagcggagagcgtggcctcaccacttcaaggccggcgctctcaacgccctgctgcgagtgtcgggcgtggtgagcaacgcgccctacgtgctggtcctcgactgtgacatggcctgcaacagccgcgcctccgccctggacgccatgtgcttcctcctcgaccgcaggccgccgccggacagcctcgccttcgtgcagttcccgcagctgttccacaacctcagccacaaggacatctacgccaacgagctcagatacatcttcgggacccgatggttcggcctggacggcgtccggggccctcccctctccggctccggcttctacgtcaggagagacgcgctttacggggccacaccgaccgcggacttcatgcccgatgccaccgccgtcgccgagctcaagacaaggttcggccactccgaccgtctcgtggcatccttacgcagccccggcgttccaccagaagcagaagcgatgatgtcccttgcggcgctggcctcctgcgcatacgaggccggcaccgcctggggcgccggcgtcggcttcatgtaccagtcggtggtggaggactacttcacggggttccagcgcttcttcgcccgggggtggacctccgcctactgctacccggagccgcgcccggcgttcctcggcagcgtgcccaccaacctcaacgacgtgctggtccagaacaagcgctggatgtccggcatgctcgccgtcggcgtctccaggcgccactccccgctcgcctgccgcccgctcctccgggcctccctgctccaggccatggcctacgcctacttcggcttcgccgcgctctgcgccgtccccgtgctctgctacgccaccctgccgcagctctgcctcctccggggcgtcccgctattcccctgccccgccgccaccgcggcggcgttcgcgtcctcgcttctgcagcacatggcggaggtgtgcgtgtccaggcggggtaggctggacctgcgcacgtggtggaacgagcagaggttctgggtgctcaacgccctcacagcccagctcttcggctgcgtcagcgccgcccaggagctgctcggcgcacgcgccttggacttcgacctcaccagcaaggccgccgtcgacgggagcctgtaccaggacggcgtgttcgacttcacgggctgctccgcgctgctgctccctgccaccacgctctccgtgctcaacgccgctgcgatcgtcgccggcacctggaagatgtcgtcgtcgtcgtcgtcatcgagcggcggcttccacttcgccccgcagctgttcctcatgtgctacggcgcggcgctcagctacccgctactggaggggatgttcctcaggcgggatcctgcgagggttccgccacgcatcaccgcactctcggtcgcattggcagccgtgctgcttgccgccatgcttggatgaacatcaaccgagagatgcacggcctgcttcaactcttgtctactgttctagatatactgtacttttaattactattcccactgtattcccaccgttgaagcacaacaacgcagtgaactaaacgacgaacgagaagaagcccaaggttaattagaactaatttatgatatacgttcggactaattattctacacatcaaagatattt

SEQ ID NO: 538 - DNA, 1563 bp, Zea mays
atggcgatcggggcgttcgtggagggcgctccggcggacggcggagaaggttacagcggccgcgtgacgcccttcgtggtgctgtcctgcgtcgtcgccggcagcggcggcgtcctcttcggatacgacctcggcatctccggtggtcttacctcaatggactgcttcctgaagagattcttcccaaaggtgtaccgtcagaagcaggacagcaaagtgagccactactgcgagttcaacagcgagctcctcaccgtcttcacgtcctccctctatatcgccggtcttgttgcaactctggctgcagcaaccatcacaaggaggtatggccgtcgcacatcaatgctgatcggcggcagtgtcttcatcgcgggctcagtgttcggtggtgcagccaccaatattcccatgctcctaatgaacaggattctactggggattggtctggggttcactaatcagtcaatcccattgtacctgtccgaaatggcgccaccccgataccgcggggcaatcaacaacggcttcgagctctgcatcagccttggcatcctgttcgcgaacgttctcaactatttcgtcataaaaatcacagcaggatggggatggaggatatccctgtccatggccgcactgcccgccgcattcctaaccatcggcgcgatcttcctccccgagacgccaagcttcataatccaacgtgacggcaacaacacggacaaggcaagggtgctgctccagaagctgcgcggaacggcctcggtccagaaagagctcgacgacctggtccgtgctagcgacctctcacgagcaacccggtacccattcaggagcatactcgagaggaagtacaggccgcagcttgtggtggcgctgctggtccctttcttcaaccaggttagcgggatcaacgtggtgaacttctacgcgccggtcatgttcaggacgatcggtctcaaggagagcgcgtccctcctgtcctcggtggtgacacgcctgtgcgcgacgtctgccaacgtcgtggcgatggtggtggtcgacagggttgggcgcaggaagctcttccttgccggcggcgtgcagatgatactttcgcagttcaccgtcggcgcgatcctggctgcgaagttcagggactacgaggagatgggtgatgggtacgcgtacctggtgctgaccacactgtgtgtgttcgttgcaggctttgcgtggtcgtggggccctctcaccttcttggtccctgccgaggtttgcccgctggagatcaggtccgcggggcagagcatcgtggtcgctgtggttttcttgatgacgtttgtgattagccagacgtttcttgaggtcctctgccgcgtcaagtcggcgacgttcttcgtcttcggtggatggatctgcctgatgacgttgttcgtttatctgttcctgcctgagaccaagaagctgcccatggagcagatggagcaggtctggaagacacactggttctggaagaaggttgtgggagaggaagcggataggaaagaagcaggagcagggaatatagctttgtcgggcttgtcttag

SEQ ID NO: 539 - DNA, 1526 bp, Zea mays
agagcgcgatggctcgcccactcgcctgtcgcctcgcgtcggattccagcagcgtcaagggttgcgtgctcgggcctcgggctggtgagagaacgaagagccgtgggtgcaactgcaactgcaactgcaacgaactagccgcgtccactgccatcattcgagtcttccctggttgcggctgcacagggactcgatggcgtcctcctccctcccggcgcccgcggccggccgcgccgagctcctcaaggccttcgacgacgcccgcacgggcgtgcgaggcctcgtggagtcgggcgtctcgtccgtcccggagctcttccgccacgcggacccctacgcctccatcccgctcgccccgcccggcgtttccatccccgtcgtagacctctccctcccgccccacctcgccgcggcggccgccgcgtcggccgcccgcacctggggcttcttccacctcgtcaaccaccaccacgccctccccgcggccgccgccgccgccgacgacgactaccccgagcgcgccttcgcggcggtgcgcgccttcaacgaactccccgcccacgagcgcgcgccgcactacagccgcgccgtggacggcggggtcaactactcctccaacgtcgacctgtacaactcccccgctgccagctggcgcgacaccatccagatcctgctgggccccaaccgccacccggacctcgccgaccggatcccggccgcctgccgcgccgaggtgctcgagtgggaggtccgcgccaccgccgtcgcccgcgccttgctcaggctcctctcccaggggctcggcctccgccccgaggcgctggaggacgcgtcctgcgccgacgggaagctcatggtgtgccactactacccgcactgccccgagccggagcggaccatgggcatcgtcccgcacacggaccccggcgtgctcaccgtgctcgcgcaggacggcgtcgggggcctgcaggtgaagcaccaggatgaggacggcaaaatctcatgggtggatgtgaagcccgtgcccggagcgctcgtcatcaacgtcggggacctcttgcagataatgtctaatgacaagtacacgagcgtcgagcatcgggtggtcatgaacacacgtgaagaacccagggtttccatcggcatcttcttcagccctgggaagagaggggactcggtgttctatgggccgctgccagagctggtctcttcagagaacccgcccaagtacaggaacttcaccatgtccgagttttacgggaccttcttctcacgagaccttgccagcaaggctctactcgacaacttcaagctgtcaccttaaagtgtcgactccagctcgaatagtttagatagactcgtgtatactatagtcatgcgtgaattgtgattgccggctggcaatgtatagaaattgttctgtcttggcctgcatcagtcgtacgcaggtcaccagccgacaccgcagtgtgcccggccgcgctgggcacgctgcatgaccggccagagaagcaacgtcacagaaa

SEQ ID NO: 540 - DNA, 1152 bp, Zea mays
atgcaggatgatcctttctacattgaaagaaggaacaccaacatgtctactggttttggaggaacaaaaggatccaagagagtggtagcacctaatgtagaagaccaagttggtagagtaactaggcagaagacaaaggaactatccttagttgagaaagatatacatggtttgactgcaaatacagatgagcacacattgatttctgccaattttcctgcacaccatgatgacgagattcagatgtgtgatgaaggcaagaaaacaggtcaatttgccatagacaccaaaaacaaagatgtcaaatatgcatgtgctgatttgatgaggtgtaatcagcgacaaatgagatataagctcaagaaggcttactttaatggtgtggcagctgacaaagtgagaacaacatcaccgttgagtactatgacagatgagcaatggatgcaactagtcaatatgtggtctaccccaaagcacaaggaaaaatgtgtgaacaacaaagtgatccgtggaaaagttcggttccagcaaaagacaggatctcggagttacattgcacatatgcatgccgtggacacaatggaagcacttgtggctgagcctggagtagaagggaaagaatctaagacccctacagaagcagttgctcaagtgttgtcttcatcaaaatttctttataatattggtcttgtacctgccacaaagaaaagctgcaatggtggtgatcctacacgcgtggcagaacttgaggctgaacttgaatcagagaagcaaaactcattagaagttagagctcagttagatgccctaaagaagaaggtagaagaatcagaagaagcaagggctaaggagttagaaaagattaatgatctgcaaaaaggagcagatgagaccaatgctctccttcgtcgtctctttagcctcaataagtagttggtcgattgtgccctgattttgctgtcctatttgtactttgctttgcactctacttgatgctggtgacaaaacatgatgatagttttaattttgatatgtccttttggtactgtccttagcacactactagatgctggtgtgatgaaacatggtgacaattttgaaaaatttgaaggatttggttgttgataaatgatatctatgataatatgttgc

SEQ ID NO: 541 - DNA, 1378 bp, Zea mays
cgtccgcaccgccagcgccacccgcgtcgccatctccaccaggcatccacaccaccaccttgggcgccgggcccttccatgctttccttcgctcgtcgacaagaacaagatatactagtgctagctgttctgtgctgcggtcgtcgtcttcttatataagacgccaacgacgcatgtcctcggagcctgccgaggccaggatatagaggcgtcgccgggccgggccactgcacggtcggcggatatggctgtcgaagcgcacagcctcctcttagcaggagggcacaagcaactcaccagcgcgggatggccttggacgaccggcgacgaagctagatgcgcgacggcgcgaccgagccaccagcaggctttccagctccagcaggcctcgtgtgtgggcgtgggcgtgggcctgccggcggcggctccggtctcgtcggccgcggcggcgccaccagcgccgatgatagcgcagcagtacgctgctggcggacggctgttcgtgggagacgcggcggagagcggcgtcacgttcggaggaggaggtgcggtgcagcaggaggcgccccggaagcggaagcgcgccgagcaggggcagacgccgccgccggttcttgggaccggcgcggccgacgtggcggcgcagtttcaacagcagctcgtcgacgtcgaccgtctcgtcctccaacacaccgccaagatgtgggcggggctcaccgagcagcggcggcggcacgcccggcaggtcgtggccaccgtggaggccgccgcggccccgcggctgcgcgcaaaggaggaggagatccggcggatgcggcgcgtcaactgggcgctcgaggagcgggtgaagagcatgtacgtcgaggcgcacatgtggcgtgacttggcgcagtccaacgacgccgcggtcaccgcgctccgcggcgagctgcagcaggcgctcgacgcccagcagacgcgccgccgcgccgacgacgccgactcgtgctgctgcggggagaacgacgtcttcatcaccggagcaggcgcggcggagaacgaagaggaggccgggaccgggacgtcgtcgtcgggccacgtcaggggggcgtgcgccgtgtgcggcgacaacgcggccgacgtgctgctgctgccgtgccgccacctctgcgcgtgcgcgccgtgcgcggccgcggcgagggcgtgcccggcgtgcgggtgcgccaagaatggcagcgtctgcgtcaacttttcgtgatggtcctgaaaccgatagaattactggatagactagaattttttttggagacggatgcatcttttgcacttgccttcccccctcccccccctccaaaaaccctcgagcgagaagaaaaaatatagtcccaaagttcggaaa

SEQ ID NO: 542 - DNA, 588 bp, Zea mays
atgggcgtgggcgtggcgggcacggcgggcatgagccacggccccgcggcgccgtcgccgaggtcgtcgagcacgatgccggcggcggggcagtcgccggtgccgtacctcttcggcgcgctggcggccatgctggggctcatcgcgctgtcgctgctcgccctggcctgctcctactggaagctgtccggcggcggccaggaggcgtacgacgacgacgacccggaacgccaggccggcgccggcgcgggcgcggaggcccggcccggccacggaaaggccgcaccgaccggcaagggcaccggggagcgttggcgggagcacgcggtggtcatcatggccggccacgagaggccgacgttcctcgccacgccagcgtcgtcgcgccggggcccgaacggcgcccgtggcgtcggcgtcagcgtggactccggccctggcgactccgaggacggcgacgaggcgaggtgcgtggagtgcggggcgcggtcttggccggctcgcgcggccgacagcgagggcgagccggggcggaccgagcagagtggtgcaagtggtagctcggtaactgtaatcagtgagagatga

SEQ ID NO: 543 - DNA, 555 bp, Zea mays
atgtcgatgctcaccagcatactgggccgcaagcatcagccgccgccgcagcagcagcagcagcagaagggcggcggcgcgcgcactggcaccggcgccggcgccggcacggaggcggcggcagtggagccggtgagcatcgacatcgcggagcaggggccgctagtggacgccatcacgctggcggcgttcgcggcgccggcgctaggcctgccgccgttcgcgacggccagcatggactggaaggagacgccgacggcgcacgtgttcatggcggacctccccgggctgcgccgcgacgaggtgaaggtggaggtggaggaggagaggctgctccggatcagcgggcagcggcagcgcgccgccgaggagaagggcgaccgctggcaccgcgtcgagcgcagctccgaccgcttcgtgcgcaccgtgcgcctcccgcccaacgccaacaccgacggcgcgcaggccgcgctccaggacggcgtgctcaccgtcaccgtgcccaaggacaacgaccgcaaggcctacggcaggctcatcaccatcaccaattaa

SEQ ID NO: 544 - DNA, 1877 bp, Zea mays
aaaatacactacgaccaccaccaagcgaacgaaccaacgatcgacgctccccgaccagcgtggtgaacaggacagcagtcagcagccaatggaggcagcactgacgcagcaggcggcagcgacggcgacggcgacaccgacgaggtggcggtgcgtgggggacgcgtcgctggctagccatggccagggccagcagcgagcaggcgccgtccggctcggagcggcgcggcgtgcggtcagcggggctgtccgggctagcagcagcaggcatctgggccccgtgcgggcgctcgtctccgaggccgccggcggcgagcgggcggcggagggcgagggaatggacaccgcggtgaggctgttcgtgggcctccccgcggacgcggtggtctccgacggccgcggcgtgggccgccccagggccgtctcggcggcgctgcgcgcgctcaagctgctcggcgtcgacggcgtggagctgccggtgtcctgggccgtcgcgcagcccgggcccgggggctggttcgagtgggccgggtaccgcgccgtcgccgccatggtccgcgacgcggggctcgacctccgcgtctcgctccgcaccgacggcgacgcgctccccggatgggtggccgacgcggcggccgccgaccccgacgtcctcttcaccgaccgctccggccaccgccgcatgggctgcctctcctttgccgtcgacgagctccccgtgctcgtcggcaagtcgccgctccaggcctacgaggccttcttccgcagctttgctgaagagttcgatgacttgttcgggtcaacgatcacggatgtgactatcagcctgggtcctaacggcgagctacagtacccgtcatacccgccggggaaccagggttcccgtggcttcgacggcgtcggcgagttccagtgctacgacaagtacatgctggcacggctgaagcgtcacgccgagtcgtcggggcagccactgtggggcctgtcgggtccacacgacgggccgcggtacgacgacgagtcgccggagtcgtccgccttcttcagagagctggggggctcgtggaagtcggcctacggggagttcttcctgtcctggtacaccggggagctcctggcgcacggcgaccgtgtcctggccgcggcgtccagcgcgttccgcggcaagcccgtggagctgtccgccaaggtgccactcctgcgagggccggggacgggcccgagccccgcggacgccaccgcgggattccacggcgggtacggcccggtcgccgagatgttcgcgcgccacggttgcgcggtgatcgcggccggcgtggaggcgcggccggacgccacggcggaggagcgcctggcccaggtcaaggccgcctgcacggagcacggcgtgcatctcgcggcggagagcgcgcctctcgccgtggcgcgcggcagcgacggcgacggccccacgcgcgtcgtctggctgtccgccgggcgcacccggccgtgccagttcacgtaccagcggatgggcgcagagttcttctcgccgggccactggccgctgttcgtgcagttcgtgcgcgcgctggagtgccccgaggaggcccatgaggacgacctgccagccagcgctgacggcggcgagcggctcactgtgccgtccgcggccgcggcggccccaaaggaccaagcgacaagggaggtgcaaaccgtgtgaatggcaaatcatttgtcgcgcattcttaatgtacagtacttcctccgttgtttagttcaaaataaacgggcgggtgataaatattcgagaatggagatggtatatagagcatctctaacctttatgtaaaaagttcctaaatcttagtttaatgagttattagaaaaaaagacaa

SEQ ID NO: 545 - DNA, 765 bp, Zea mays
atggacgagctcgtctgccccgccgcctcatcatgcagctctccctcgcccacctccttcttcgcggccggccacgtaccggagctcgagttcgtgtcctgggatgtcccggaggaatggatggagggcaccgactggttcgatgaacctttggatggcgacgagggctcgcgctcggcgggcaacgacctgtccggcgaaccgccggcgcctgcgccgaagcggcggcgtggccggaagcccgggccccggaccaacggccccactctcagccacgtggaggccgagcggcagcggcgggacaagctcaaccgccgcttctgcgagctcagggccgccgtgcccacggtgtcccggatggacaaggcgtccctcctcgcggacgccgccacctacatcggggagctgcgcgaccgcgtcgagcagctagaggccgaggcgaagcaggcctcggccgctgtcaccaccgcggtggcagcggccagccactcgttcgcccccctgcaggagaagctggggctggaggtgcggatggtggccgggctggacgcggcggcgctgcgcctgacgacgagcgccgcgcgccacgcaccggcgcacctcatgctcgcgctccggtcgctggacctgcaggtccagcacgcgtgcgtatgcagggtgggcggcgtgaccgtgcaggacgccatcgtcgacgttcccgccgggctgcgggacgagcgctgcctccgcgccgcgctgctccagaggctgcagccgagcggctag

SEQ ID NO: 546 - DNA, 1645 bp, Zea mays
tgaaaatgcagcaaactgaatgcagaaagctggacaacaattcacgggcgacgatggaaatgcatattgattcagtaattccttctccacttcactttacttcattcactatataaagagagaaagagatctcatcatatacacacacgacatggagatgaaggacgacgcggtagtcctcgcagcaaggccgaggcctgatgcagcagcagcggtcgtcgtcgtcaccttgcgccgcatgaacagcagcggcgacggcaggatgagctacgccgacaactccggcttccagcgggccatcgcttccgtcacaaagaatgccaggcaggaactggcggcggcgctctaccgcgcccgcggccgaccgagctccatggtcatcgccgatctgggctgcgccacggggcccaacgcgctgctcatggtgttggacgctgtcgaggccgtgctggcggtggcggaggagagccacccctcgccgccgccccagctgcacgtcttcctgaacgacctccccgccaacgatttcaacgccgtcttccgactgctgccatcgtcgccgctcgccgctaccggctgctgcttcgtgtcggcgtggccgggctccttctacgagcgcgtcttcccggaggccagcctggactacgtcgtatcctcaagcagcctgcacttcctgtccatggcgccgacgatgaggacggagcatcccaaccggggccgcgtctacgtctcggagtccggccccgcggcggtgcttgacgcctaccgctcccagttccacgccgacttcctcgccttcctctcctgccgcgccgacgagatgaggccccgcggcttgctcatcctcaccttcgtcgccaggagaaccgcccgccccaccgcgcacgactgctacctctgggacttcctcgccgacgccctcatggacatggccgccgatggcctcgtcgacgaggagcaggtccacgccttcaacgtgcccttctacggcccctgcctcgacgacctagccaaggtcatcgccagggaaggctccttcaccgtcagaaccatgcagctcttcgacatctcgcgccgctgcctcctcctccagtcggcgtcggacgatgacgacgacttgccgcagtggctagccatggagacgacaagcaccgttagggcggtcgtggagcccatgctgcgagcgcacttcggcttggaagccatggacggactcttctgcaggtacagcctccggctagaggagtactaccgcagcaacaccagcagaaacaaggacgacctcaccaacgtcttcctcgtcttggagaagaaactgcactagcgctagtgcgctactctagctagctatgccatggagatacatctactgctagtgctagatgcgtgcatgactcttcggataaacgtacggaatgggacatccctggtcccttcccagtccccagctccagacctccagtctccgtcgacaatcctcatcatgcatctgttttttttctagaaaggaaaaaatattatgtctacctgttttccgtctactagtactagcttggatcaattattcaatttcttaattagtactttgtcctcctattcgtcggtctgatctataaggggattgaaggcgaataaatactctcct

SEQ ID NO: 547 - DNA, 1239 bp, Zea mays
atgtcgcttagaactactgcttggctatcggccaggccagggcaccaccagccggtgcagtgtttgtcgtcgccggagaaaccacgccgccggtcggcgaactaccagcccacgtcttgggactacgacgctcttctgtcacttgattctggcagacctggtgatcaggtccatccttctagttattataagatgaagagaaggataagagatatgttgctcaagaaagtagaaccatcttctaaacttcagactattgatgcaatgcaacgacttggaatctcttaccactttgaggatgagattagtaacatcctatactccatctccaatgagagtaccaaagctcagtacacatatgacaacattgctttcacagccttaaaattccggttacttagagaaaatggtttcccaacaatcctaggaccattaggctaccataattatgaaaaattcatcacaaagacaccaagtctggaggacgcaaacacacttctattactatacgaggcctcatatctggcatttggagatgaggaaaaattggatgtagcaaggacattttcagctaaagcacttaagcaacttatgccattcatgctaccacacttaagggagggtgtggcacattctttagaacttccactgcattggagagcttcaagactagaaacaagatggttcattgattactatgctagagacagaaatatgtgccccttgctactccaatttgctgaacttgacttcaaccaggttcaatatgaacatcaaaaagatcttgcagtagtgacacggtggtggaagaaaattgggcttggtgaaaagttgccatttgcaagggatcgtctgatggagtgtttccattatgctaatggaattgtttgggacccaaagcttggaacctgtcgtcaaatgcttgctaaagtttccaatctaattgtttacttggatgatctttatgatgtatatggaaccatagaagaacttgtactcttcacaaatgcaattgcaaggtgggatgcgataccaaatgagacacttccagagtacatgaaagcactttattctattatatatgacacatcaaatgaagttgctgaacacgctttgaagaaacatggtgtagtatgcattatcttctacaaaaatcgtggtatgacatatgcctggcatttttggtggaggcgaaatggcacgatggaaactatagaccaagcattcaaaagtatctag

SEQ ID NO: 548 - DNA, 1152 bp, Zea mays
atgcacggtcgccggcacctcgcggcgtcccttacccgggccctgatccaggcgccatcccgctccatctcctccaccccgtctctcctccaaaccctcgacccctcagtgccgtcgcctcccgccgcgggagcagggcggctcgcggagctgcggcggcggctgcaggcggacgcgccgtcgctgggtgacttcacgtactcggtggaggtggggacgcggcagcgcccgctgcccaagcccaagtggatgaaggagaccgtgcctggcggcgccaagtacgcggccatcaaggccaagctgcgggagctgaagctgcacaccgtctgcgaggaggcccggtgccccaacctcggcgagtgctggtccggcggcgagactggcaccgccaccgccacaattatgatccttggggacacctgcacgcgcggctgtaggttctgtaacgtcaagacatctcgaacaccccctccacccgatcctgatgagccttccaatgttgctcaagctattgcctcatggggccttgaatatatagtaatcacgagtgttgaccgggatgatctacctgatcagggcagtggtcactttgctgaaacagtacagaagctaaaggctttgaagccagaaatgcttattgaagcgcttgtacctgatttccgtggagatccaagctgcgtagagaaggttgcgacttctggattgcatgtttttgcgcacaacattgaaactgtggaagagcttcaaaggaatgtcagagactaccgtgcaaatttcaagcaatctatagatgttctggaaatggcgaaagagtatgctcctcccggcacccttacaaagacatcgataatgctgggatgcggggagactccagatcaggttattaggacgatggaaaaagtgagggctgctgatgttgatgtcataacatttggccagtacatgaggccatcaaaacgtcacatgcctgtttctgagtatgttacgcctgaagcttttgagaagtatcgggcccttggtgtcgaaatggggttccgctacgttgcgtctgggccaatggtccggtcttcgtacaaggcaggtgaattctacatcaaggctatgatcgaagcggagcgagccaagggaaccgctgcagactcaagtgcataa

SEQ ID NO: 549 - DNA, 849 bp, Zea mays
atgacagccgtggccctggcgctgcccacggacgacgacaaagacggcggccgccgaggcgtcgatcactccccgactgctcccgcgccccctcctccgccgccgccgccgaaggagctggtcatggtggcgcgcgccgtgcagcggctcgtggcgcggaacgacgcggtggtgccgccggcgccggacgggagaggaggaggccggagactcgggatgcgggcgttcgaggcggcggagggcgcggcggcgccgcgcatcggcgtgcccgagtacctggagcgcgtgcaccgctacgccgcgctggaccccgagtgctacgtcgtggcgtacgcctacgtggacatggccgcgcaccgccggcccgccgccgccgtcgcgtccaggaacgtccaccgcctcctcctcgcgtccctcctcgtcgcctccaaggttctcgacgacttccaccacagcaacgccttcttcgcgcgcgtgggcggcgtgagcaacgcggagatgaaccgtctggagctggagctgctggacgtgctcgacttcgcggtcgcggtcgaccaccgcgtgtaccgcagataccgcgagcacctggagaaggagacgacgctgatgatgctgcgcagggacgacggccacggcccgcccgtgcccgtgcccggcagcggcgcggcgcccaccaagtcgagaacggccgcgtcgtcggtcgtcaagccgccgctgacggaggatcgtcgccgcccggccgaagctggcgacgccgacggcggcggcgaacacgacgaccggcggaagctgcccaacagcgcgacggcggcggcgtctcttcgagagctgtgggccttcgattactag

SEQ ID NO: 550 - DNA, 2100 bp, Zea mays
atggcgtccgtgtacacggcgccgcgcgccccgctcccgacggtggcgtcctcctcgtcatccgcgcggcaggtcgatccgaaccctagtggaagccgcttcctcgccgggcggcgcctccgcgtcgtccgccgcctcgccggcgcggccccgtcgcggcgcgctccgtgggtctgctactccgcgcgtagccccgacgcggacgccggcgatgagcaacgccggcggggttgggacgcgatgctccacgacgccttccagggtgccgtgcgacggtggagcgagtacgtcagcaattactggcccctaccgccctctgtgaaggaggcgggtacggggaagagggttgggagttcttacgatgaggaggtgatgaatggggatgaagaggagatgaaggttggggaggaagagggaaagtggagctgggagaggtggaagcggcattttgctctcattgaggagagcgagcgtctcgttgatgagctccagttgcaactccaggcgtctgtttacagggaggactacagaagtgctcataagctgaggctagctattgctactatagtgaaaaatgacactgtgggtagagctgtctctgacttaaatatggccatagatgaggaacgctacaaggatgcagcatatatcagagatcatgctggcacaggactgctggggtggtggtctggaatttccggaaatttgtccgatccatatggtcttataattcgtataagtgctgaacatggtcgatatgtggcaagaagttatgatacaagacagctgacttctgactcttccggcctccctatatttgaaatatactttgcagaggcaaatggtggatacaacctgcaggcagtgcatctgaaaccagatgatagtgattctgaccaagtgccaaatatgttaagggagaaacttggcatggacagtataaatatatctagcagttcagtagggtctaagcatgaagaattcgatggaagtgtaaacatggatgataaagatagtgatgatagcaacattgatgctggccctggctcgaaagacttgtcaagcgatccaactgcagttcccaggattaaaatcttgaaagtcgtacccatgcagaatgttgacaaagactacataatcaatatttttgatcagatttcagaggaaaatgatgatcctgaagttgaaaatgaatcttcagaagatgctggtgatgaagataacagtggagtagcagagaccgtttctgcagaagagaacggtgatgaatctggtgacgaaagtgatattgaacccttggtttcaattgattttgtcattgagaataacgatgactatgcttctcatccatctgctgaagcttttgaacgaatgccagctagattagaaaaaagagaccgcttctcgttttccttctatactgaagaatatagtaaaaaactagatgctggaaaggcccagcagacttcaaagaaaacagttcgtttgcataccgatcagcaggattatgatggttttgttgagcttgatcgtgtaaagttgagcggcagcaacaaaaaactttcgatactacaacttggcatcaaacgaaataacaaggttcagaaaaaactgcatggagttacccactttagtcgtattcagatgcctatatcttcagatcctcttaccggcttatatttgaccgcatcaggatttgactcagaaattcttagtttacaacgaaaatttggtcaatggcgggaggatggtccatctgaggagcatagtgacctattgttctatgagtatgttgaagctgtaaaattaacaggggacaacctcatgccagctggtcaggttgttttccgtgcaaaagttggtgaacactatcggctccctcataagggaattatccctagagaacttggagtgattgctaggtacaaggggcaaaggaaaatcgccgatcctggtttccaaaaccctcaatgggttgacggggagcttttgatactagatggaaagttcatcagagatggtcctgtgatagctttcttttactggacatctaatgttcatctttttgaattctttagacagttgaagcttcctgactag

SEQ ID NO: 551 - DNA, 567 bp, Zea mays
atggaagccgtggtggccacgacgacaacgagggtgtccttccctctgctgcccaccgcggggaggcccctgctcccgccggtcctggcgcggccccgccgcggcttcgcctccgtctccgccacctccacatccggcgcaggcggcggcggggggcgctcatctgcaggcggctgcggcggcgacggtggaggggacgactccggtgccggcgcagccgcggccgccgcggctgtggcggctctgggtgagtccgagcagcaggaggacggcgactctgacgcaatcgtgctccatgtcgggggaatgacgtgcggcggatgtgcggacaaggtgaagcgaattctggagagccagcctgaggttgctgcagctacagttgatgtcgaaaaggccaccgctattgtgtggacgacacctgaagcgaaggctaccaaagactggcaaaaacaattggccgagaaacttgccaaccatctcacctcttgcgggttccagtctcatctgcaaggtgtgaagggtacatttgtttcatcattcaatccattcatacaaacgcataattaa

SEQ ID NO: 552 - DNA, 1257 bp, Zea mays
atgccgccggcgatcccaagcctggtccacccgtcccgtgtgcggattctccacccgggcggaagccatattcacgggccggtggtgtactggatgctgcgggaccaacgtctcgcggacaactgggccctcctccacgcggccgaactcgccgctgcgtccacccccgcggcgccgctcgccatcgctttcacgctattcccacggcctttcctcctaggcgcgcacctcagacagctaggtttcctcctccgcgggctccgccgccttgccgccgatgcgcacgcccgcggcctcccgttctttctactcgagggcggacctgcggagctgccgtcgttggtgcggcggctcggggcttcggcgctcgtcgccgacttctctccgctgcggccggtgcgggaggcattggatgctgtcgtccaggagcttctgcgtgacgccgccaacatggccgtgcaccaggtggacgcacacaatgtagtgcctgtctggacggcgtcagggaagctcgagtactcggccaaaacctttagaagtaaggtgaacaaggtgataaacgagtatctggtggagtaccctgaggttccgcagtgggcgccttggtgcatggagcagccgaagagtgttgactgggatgcactgatcaatagcatcttcagtgaggctgagaatgtgccggagattaactggtgcgagcctggggagtcctcagcgatggaggtccttcttgggagtaaggatgggttcttgacgaagaggattaagaactatgacactggccggaatgatcctacaaagccacatgcattgtcgtgcctttcaccgtacttacattttgggcacatttctgcacaaaggtgtgctcttgaagcaaaaaaacgccgtcatcttagtccaaagtcagtggacacgttcttggaggagctgataataaggagggaactagctgacaatttctgctattaccagcctcaatatgattcactggctggtgcatgggagtgggctagaaagaccttaacggatcacactggtgataaaagagagcatatctatacgagggagcagctcgaaaatgccaaaacatctgatccactttggaatgcatctcaattggagatggtgcatcatgggaaaatgcatggatttatgcgaatgtattgggccaaaaagattctagaatggaccagtcaacctgaagaagcactttccatagcaatatatttgaacgacaaggtaaatttagaagaatga

SEQ ID NO: 553 - DNA, 2016 bp, Zea mays
atggacgcagacaccttcccagtggggctgcgcgtgctcgccgtcgacgatgaccgcgtctgcctcaagatcctagagaggcagctgaagtgttgcaactacaacacgacggtggtgacggatgcccagacggcgctggacatgctcagggagaggaaggacgggaaccagttcgacctggtgatcagcgacgtcgtgatgaccaaaatggacggcttcaagctcctcgagctcatcggcctggagatggatctcccagtcatcatgctatccgcaaacagcgagacacagactataatgaaaggtataaagcatggggcctgtgattatatggtaaagccagtgcgcctcgaacagcttaggggcatatggacccatgtggtgaagaacagtaagattgatccaaggaacaacatcggcagtgacagtgatgatgttgttcagaagttgccatctggggatggtgataaaggtgagaaggttggagaaacccgccaaaagaagtatccaaagaaaaacaaaaagactgtggatgttgctgatgaggataacgaaaaaacatcagcccagaagaagcaaagggtccaatggtgtggtgaactacatcagaagtttgtacaagctgtccgtcagattggcattgatagggctgttcctaagaaaatattagaaatcatggatgtggaaggccttactagagagaatgtcgccagtcatctgcagaagtaccgaatctaccttagaaagctcggtgatggcacactgaggagttctagtccatttgctgatgaaactgaagcatttcggagaaacatgaatgtcccatccttcattagctcttcgagctcaagcaaccattttgcaaagatgaattcctcatcactaattggaacggagacattgctacccacagagtcagtttatattatgagcccccagaaaaacttgggcatttctcggtcaaacatggaaccagtttctcatggtgtgaacttacccaaagatgttattcctatgccagtgcaggatattagcagattcatttcttctggcaagtcctatgcacctgtatggagtgatgggctgctaggtagaagccagtgcttcccttctggtccttctggcagctcctttgcaaatatttcaaatagtgtggtgttgaacgcaagcaaacctttctctgttgatatttctgggagatcattagcaaatggctcaaatgacaggccaccattgacctcgaatatgtgcttttcttcgtctcattcttgcagctcctatgcgagcatattgggtggcaagattttgggatcaagcagacgtattccgtttgaggacatagcagatggtgagatgttggctcctggtaatttaccattgcagtctcctcagttggtgaaacagccttcttctgctggcctatttaacgaggttgccagagacgttcaccaatttgcaggacttagcaactcctggaaagttgctgtgccgccaaggttttctgatcttggtcataatgttggaacatctgaaggtcattcgcagggtaacattttcaagatcaaccggttgtcaagacttgcacgctcctctgcacagattccaacgttcagaaatgagtatcagaagaaaaccacaggaatcatggggaaagccgtaccagtggtaggtttcagagagcaggtggcaccattcagctttgaaaacaacacacgctctacagtgacgctgataggcaattctgctttgtctagttcttcaagcaccagacctggccttaacatcaacaattctgccatgctgacgcaagtgctgaatggcggtggtgcaaatgacaacctgcatggagttagcaccgttaatcagcaagctgttaatgaccaagtgaataacgaattcttcatgggaacaaatgaggcacataatgcggagagtgatgatttggatgatttccttgcgtacttagttaatcaagatttcatcaacaatggtgattctttcatcgatagggactga

SEQ ID NO: 554 - DNA, 1413 bp, Zea mays
atgcatgcatgcaagatgatggcgggacataataaaagaaacattattctcatgcacaagtatgagatggggagattgcttggtcaagggaccttcgctaaggtctaccatgctcgcaacaccaggacctcagtaagtgtcgcgatcaaggtgatcgacaaggggaaggttgtgaaagtcggcctcgtcgaccagatcaagcgagagatttctgcgatgaagctcgtcaggcacccaaacgtcgtgcagcttaacgaggtcatagccaccaagaccaaaatatacttcgtgttggagtatgttaaaggcggggagctcttggctaaagtaaagcgaggaaggcttaaggaagatgtggcgaggaagtacttccaacagttgatctgtgcgctggacttctgccatagcaggggtgtctaccatcgggacttgaagctagaaaaccttttgctcgatgagaatagcgacctcaaggtatcggattttggtctaagcgcgcttgctgaatgccgaaggcaggatggcctgctccacacgacctgcggcacgccggcctatgttgctccggaggtgattaacagaaagggttacgatggtgcaaaagcagacatatggtcatgcggggtcatcctctttgtgctattggctggttatcttcctttctatgataagaacttgattgacttgtataagaagattgacagtgcagatttcagatgcccgacctggttttctactcatgttcggaggcttttgctaaggattcttgatcctactcctggtacaaggatctcaatagaaaaaatcatggagaatccctggtttaggcagggcttagatcatgcaaacctactacttagatataatttaaagactaatgatgcccctcaagtggacacggacaagaatgaagattttgatccaccgagcaccaacataacaacagatagcaaacaggaggacgaaaagaagcctgccaacatgaatgcatttgatataatatctcatctatcaagtggtttggatctctcaggtttattccaagaatctgacaagaaaacagaatctaaattcacttctaccaacacaagctcggcaatcatatcaaagattgaggatattgccaaggatttgcgactgaagttgactaaaaaggatggtggtttgttaaagatggaagcttcaaagcctggaaggaaaggggtgatgcgtatcgatgctgagatatttgaagttagcccaaacttccatctcgtggagatcaaaaagactaatggtgacactctagagtatcaaaaggtcatgcaccaagaaatgaggcctgcacttaaggacatagtatgggcttggcaaggttgtcggatgcgtcatccaccccacgtctgtgcgcgcaaaaaaggaatgcatgcatga

SEQ ID NO: 555 - DNA, 2067 bp, Zea mays
atgacgtcacgctcgtaccgagcgacgaatcctccacactcccatatacacatgcaacagagacacacagtcacacgccgacaccctcacgcccacacacacagcagcagcccagctacaactacaagctactccaccacctccacacgaagtgggactgtgggaggcgcgagtgacgtgaggcgagccgctcctgctgcagcgatggagcccgcggagaacgacacgtcctcgccgcctgagtatggcgcaggcaaggccgcggcgaccgtaccggcgaggagctactggcggtggcgcagggacgacttcttcccggagccgtcgttcgcgagctggggcgcgtaccggcgggcgctgcgcgagacgccggcccgcctccgcgaccgcctcgcggggcggtccaccgacgccgcggagctgggcgcgctgcgccggcgcagcgagcacgagatgcggcggtgcctgacgtggtgggacctgacctggttcggcttcgggtccgtcatcggcgccggcatcttcgtgctgacggggcaggaggcgcgcgaccacgcgggcccagccatcgtgctctcctacgtcgcctcgggcctctccgccatgctgtccgtcttctgctacaccgagttcgccgtggagatccccgtggccggcggctccttcgcgtacctgcgcgtcgagctcggcgacgccgcggccttcgtcgccgccgccaacctcatcctcgagagcgtcatcggcacggcggccgtggcgcggtcctggacctcgtacctggcgtcgctcgtcaacaggcccgccagcgcgctgaggattcacgcgccggggctcgcgggcgggtacgacgagctggaccccatcgcggtgctcgtcatcgccgtcaccgccacgctggccatgctcaccgccaagggcacctcgcgcgtcaactgggtggcgtccgccgtgcacgtgctcgtcatcgccttcgtcatcgtggccgggttcgcgcacgccgacgcggccaacctgagacccttcatgccgcaaggcgtgccgggcgtgttccgggcggccgccatcgtgtacttcgcctacggcgggttcgacaacatcgccacgatggcggaggagaccaggaacccgtcgcgggacatcccgctgggcctgctgggttccatgaccgccatcacggccatctactgcgtgatggcgctggtgctgagcatgatgcagccgtacacggccatcgaccgcagcgccgcctactcggtggcgttcgccagcgtggggatgcggtgggcgcagtacgtggtggcgctgggcgcgctcaaggggatgaccacggtgctgctggtgggcgcgctggggcaggcgcgctacaccacgcacatcgcgcgcagccacatcatcccgcccgtgttcgcgctcgtgcaccccaggaccggcacccccgtgcacgccaccgcgctcatcgccgtgtgtagcgcctgcatcgcgctcttctccagcctcgacgtcctcgccagcctgctctccgtcagcacgctcttcatctttatgatgatggccacggcgctcctcgtccggcgctactacgtgcggggcgtgacgagccggacgcacgcgctgcggctcacggcgctgctgctgctcatcatcgcctcgtccatcggcatcgccgcgtgctggggcacgtcgccggagcggtggcagggctacgtggtgctggtgccggcgtgggcggccggcacgctgggcattcaactgctggtgcccgcggcgcgggcgcccaaggtgtggggcgtgccgctcgtgccgtggctgccctcgctgtccatcgccaccaacctcttcctcatgggctcgctcggcaaggacgccttcatccgcttcggcgtctgcaccgccgtcatgctcgtctactacgtcctcgtcggcctccacgccacctacgacgtcgcgcacggggcgtgcggttgggaagaggaggacgacggggacgcggccgccgcggacgaggacaagaaggttgttgccgcggcagacgtggagaaggctgatgcggcaggcggcacccgttaa

SEQ ID NO: 556 - DNA, 1848 bp, Zea mays
atgggtgttgtctattaccaatataagagtgaaaaggaaatctgttctatgcccgtgccccatgcttttatttctgtgtctgaactcaagcagcttattatgacgagcggtaggcacggccgtggtcgaacccgcggtcgtgccacagaggatattgtcatctccaacgcccaaactggcgaagaatatgcagatgaaagagcatccataccacagaacacaactgtgttggtccgcagaatttccattcctgggcaactgtcagagaagattgttttgtcccctaggccggaagtcacagaagaatgttctgtaccttgcaagtcggtggttactgactcaagctcaaagtcatgttcttccacagtagtgcaagatgaagatgctgtaattgcagcagtaattgatgctgctgaactcaaatgggaacagctcccctctaaaagaggacaagacagtggaaggtttacatcaagacgtaactatgggccgttggaaggggaaacacctccacccggctatgtctgccgctcttgtggtgttccaggccatttcattcaacactgctcacaggaaaacaagatgcctccacctggatacatttgctacagatgccgaattccagggcattttatccaccattgtccaagcattggcgatcccaagttcgacaacaataaaatgtccaggtcccttgtcccagtagttacacctgtcgatggcattttggattcacttgtcccgtctgccccagccggggctgttgatgacttgccagcagagctccactgccgactatgtaaaaaagtgatgagagatgcagtattgacaagcaagtgctgttttgacagtttttgtgatagatgcattcgggattatattattaaagagtcgaagtgcatttgtggagtggagacactagcagatgacctcattccaaatcaaacacttcggagcacaatcagcaatatgttgggaacacagacaagcagtggtggtagtggtacaacaagacacagaagttcgtcaggcagcaaccctaacccaaaaatacagagccacactgcttctgttgcgtcagcaagggaggtgaagcagtctatagaccatcagctaccagcggtatctgcacctgattatgtgctccaggttgccacagagggcgacctggtgaaccagcctctagagaaactcgccgccactgctgaaatccttagcaaatatgaaggcaattctgcagaagtgtcagtagagaaggcggtagcaaatgctgaagccctcaaagtgaaggatggaagtgaaacgacctcgaatgccaccactgtttcagggtcccgagaacatgatgtcacaaggacagatcaagcaaagaagaagcggaagaaggcagacttaaccaagaacgttcagcctaacaatgttggctatggttacaatgtttcttttgaccctgcatattacaatcccttcatcaatggacatccttgggcaactgaaccctatatgtatagctcaatggggatgccgtacgctggttatccgatggacccatattgtgcaaatccaatggacccatattgtgagtatccaatggacccatattgtgtgaatccaatgcaaggctatccagcaagctaccaaaggcctgaaactgagcccatgcgtcgtgggagcactgcggctgccagagcacctttaaagcaccgtgagaggagtgaccggcaccggcccaaggacactcgtcttcagccccaatcaacagagcacaagcgaaggctcgtctcctctcatggaacaaggtcaaactcagatagaagggatcatgggcattcttatggggcatcctga

SEQ ID NO: 557 - DNA, 2541 bp, Zea mays
atggtgatggggctggggtcgaagcgtagggtggcggagggcggcacggagcccgaggaggagtcctcggaggagtacgaggtggaggaagtgtgcgaccacatcgcctcctcccgtggcagccgcctcgcgctcttcggctccgacctccgcctcggccgcttccgcccgcgccggcgcaggcgccgcccgctcgccggggaaggcgccgcggagggcttcctccacgacctcgtcatccaccccgacaacagatggtatcagttatggaccaagttcatactgggttgggcggtgtacagttccttcttcacgcccctggaattcggcttcttcagagggctcccagaaaacctcttcttcctggacacagttggacaggctgcgttccttatcgacattgttgtgaaatttttcgtggcataccgtgacccagacacgtaccgaatcgtctacagtcccaccgctattgccctcagatattgcaaatcaagcttcatctttgatcttcttggttgcttcccgtgggatgctatctacagggcttgtggaagtaaagaagaagtaagatacctgctgtggattcgcttgacaagggtgacgaaggtcacagaattcttctggcgtttagagaaggacatacgtatcaactacctcttcactaggatagtgaagctcatagttgtggagctctactgtacgcacacagcagcctgtatcttctattacctggctacaacgcttcctgaatcaatggaaggatacacgtggattgggagtctgcagttgggggactacaagtttacacatttcagggagatcgatcttgccaagcgctatataacatcgttatacttcgccattgtcacgatggcaacagttggttacggtgacattcatgctgtcaacatcagggagatgatattcattatgatctacgtttcctttgacatgattctaggagcttacctgattggtaacatgactgcgctcatcgtgaaaggctcgagaaccgagcggtttagggacaagatgaaagaagtgatcaggtatatgaacagaaataaacttggaaaggaaataagggaacagatcaaaggacacttgaggttgcagtatgagagcagctacactgaagcgtccgtccttcaggatatcccgatttctatccgtgcaaagatttctcaaacactgtataagccatatgttgaaagtattccgttgttcaagggatgttccgcagagttcatacaacagattgtgatcaggttgcaagaggagttcttcttaccaggagaggttatattggagcaaggaagtgcagtcgatcaattgtactttgtctgccacggtgcactggaaggtgttggcattggcgaggacgggcaagaagagactctgctgatgctggagccagagagctcctttggcgagatctcaatcctctgcaacatcccgcagccctataccgtccgcgtctgtgagctctgccggctcctgcgtctcgacaagcagtccttcaccaacatcctggagatctacttcgtcgacggcaggagaatcctgagcaatctctccgagagcgagtatggcggacgggtgaagcagctggaatcggacatcacgttccacatcgggaagcaggaggcggagctcaccctgcgggtcaacagcgccgctttctacggcgacctgcaccagctgaaaagcctgatcagggccggggctgatcccaagaacaccgactatgacggccgctcccctctgcatctggcggcttccagagggtacgaggacgtcgtgcaattcctcgtcaacgaaggcgtcgacatggaccttaccgaccaatttgggaacacgccgttgctggaggcagtgaagcaggggcaagaacgggtggcagcgctgctcttcgccaagggcgccaagctgagcctcaagaacgccggcagccacctgtgcacggcagtcgccaagggagactcggacttcattcggcgcaccctggcctacggcgccgacccaaactgcagggactacgaccaccgcacaccgctccacatcgccgccgccgagggcctgtacctcatcgccaagatgcttgtcgaggccggcgccagcgtgttcaccaccgacagatggggcaccactccgctggatgaagcgcgaaagtgcggcggccgcgtacttggggcgctgctggaggaggcgcgggccaacgagctggctatgttcccagaacgcggcgaggaagtcagggacaagatgcacccgcgacggtgctcggtgttcccgtaccacccgtggcgggcggccacgggcgaggagcggcgtattgagggagtggtcctgtggattccgcacaccattgagagcctggttgcgttggcgcaggagaagctcggcttgccgggcccggcttcgcggctgcggttgctgcgcgaggacggggccagggtgctcgacgtcgatatggtcaatgacggccagaagctctacctggtcggaggcgaggacggcgatcagaaatatggtcagtag

SEQ ID NO: 558 - DNA, 1746 bp, Zea mays
atggcgactttggtcaggcatgattcaaggcagtactcgtggtggattagccatatcagccccaagaactcgaaatggctccaggaaaatgtcagcgacatggactcaaaggttaaagcaatgatcaaacttatcaatgaagatgctgattcttttgcaaagagagcagagatgtactacaagaaacgtccagagctaatgaatttggtggaggaattctatcgagcgtaccgtgcactggcagaaagatacgatcagtccactggggcacttcgccaggctcacagaacaatttctgaagcatttccaaatcagatgccatcaatgtcagacgagtcaccctctgctttcagccaagagatggagcctcatactccagatacgtctactctcacacgtgtggcatttgattacgatgatcttcagaaggatggagttggtgtgtcaccacaaagtttcacctccaagaggaatggtacacaccctgaggaaaccagtgcgctgtcatcgagtgttgaaaatgctcctcgtgctggttttgatggaaaggtatggaaaggactaacttttgaaggcccaaatgtcaaagggaaagatgatattagcaacgagatggcaaatttgcaacaagaagttgcaagactattagctgagtctcaagatctgaaacagcagatgttttcagaatccgagcgggcaaacaaagctgaaaatgagatgcaaatgctcaaggcaacagtattgcaattaaatgctgaaaaagacacatcacttatgcaatataataattcctctgagcgaatatctacattggagtctgagctatcgaaggctcagtctgaccttgagaaattaactgatgaaatggctgcagatgtccagaagctaattaatgctgaaacactcaatattgctatacagtctgaggctgagggtttggatcagaagatgaagatgcagcaacaagcactagaacaaaagcttaaggaattggagagtttccgctcaagcttccaggaggagcatgaaaagcgcatgcaggctgaaagtgctctactttcccagaggaaggaacttgctcaatcccatgaagaagtgcagaggttggctatagaaataaagacagcggatgaaaagttgaatgagttcaagcagaccaaggaggtccttgagtacactgtttgtgagctgaagaaggatgttgagcgccttacagaacaaaaccagtcctctgaggtgcttgtacagaaactcggcgaccagattaatacactcaaggattcaaataatgaacttcaaagtgaaatacaaagccttaagagcatcatttcacagctaaacactgagaagaatgcagctgtgcttcaacaccagcagtttgtggaactggtttcggtacttgaatctcagttgtcgaagctacagtcagagctagatgagactgagcagaaagtgcaaatgctgacacatgatcttgaaaagaagaaagaagaagcggacaatgtccatctcaagctgcaagatgaatgccataggcgtatgcaaattgaggcaactcttctgatgacagagggtctgcattcccagttgcaagaagaaatgcaaatgttgacacaagattttgacgggtcaacaaagaagctcaacccagaaagcagaggcttcggaaaatgtcagatgataaggccgaaggtgctcgtaacgaagtcaaaagactcctcagtgcaggagttatcagagaagtaa

SEQ ID NO: 559 - DNA, 1317 bp, Zea mays
atgcaggcagatgacaaactcgctactcaaatctctctccctccatcttgcatagcttctgagatcgcgatggatttcagctgctttcagccccacacggggatctgtagctacctgccattcgattcgtacatgcagcatgatggacagtatgagctccatctccatcctgctgatcaccatccgcttgaagttactggagactacacttctgcgacgttcgacgaccttggacacgagttctttgcagaaagagaaatcgagaagcccatattcaaccgtacttcatcgattggtcgtagggtgggctctcaactacctctgccgactatcaaaactgaggtttctcatctcatagacagtggcctcgtatcatgtaaggcgtatgagataaatgacaggtttctggccaggaaaaagacctctttgaagaaagccaatgtcgtgaaagggcagtggacaccagaggaagataggaagctggtaaaattagtggaacagtttggactgaggaagtggtcgtacatagcacaactgctgccagcaagagtgggaaagcaatgcagagaaagatggcacaaccatttgaggccaaacatcaagaaagacatttggagtgatgaagaggacatggttctgatagaagcccacaaggaggtgggcaacaaatgggcagagatagccaagcggctacccggcaggaccgagaactccataaagaaccactggaacgcaacgaagcggaggcagttcgcgcggaggcggagccgcaccagctccaaggcgcccaagccaggcacccttctgcagagctacatcgaaggcctcggcattgttggcccgagcgacaagagtgctgcgccactttctgaacctacactgtcgcctgaagctcccggagcaaagtcggcaaagaccggtggaacaacgctaccggaagaacacagcccgccgtccaacatgctggattcccaaggcgttcttcttcccagcgaagagcttcttgccccaatctgcgacgaacttctagatggaatgtgtggcggtcttttcgactgcacgaacgaggacgccttcttccgtgtgtgcgctgtggacgatgacatcgacgtgagctacatcttcgaccatgcgatcaaggtcgatcctgagatagacatggagatgatgatgatgtgggatgacgacgccctcgcgtgtactgctggacctgctgctggaacagctcatgtcgagaccgtgcatgtgaaggaggagatggacctgatggagatggtggcagccacgcagaactgtggcgaagcagaaaatcactag

SEQ ID NO: 560 - DNA, 522 bp, Zea mays
atgatctggtcgagggcgccggtgttcttgagcccgagcacgatgccgacgccgaggatgtggccgacggcgccgcaggccagcgtgtcggcgagggtgaacccggcgggctcacccgtctgcaggccggagtcgcgcgcctccagcttcagccccgccgtcgccttgcggttcgcggacggcgccagcccgaaccgccccgcgaacagcatcagcgtcgtcgtcgtcaccatgatctgcgttggtggcggagccgatgtagtcgcagcggatgccctgcgacgacgacctcttcctgcccaccctcacggacggcagcgctgccaccgcggacctgggcgcggcgtagccccggaggccgtggaaccggggcacggcggcggagagctgggatgccatgtgtggcgcctgcgtcgtcgtcgtcgtacgtcgcacctctgtgccgctgtaccgtcctcagctagcgcggagtggtgtggtactggtggtagtggcggtggagctcaagtgcgtgtggcttaa

SEQ ID NO: 561 - DNA, 963 bp, Zea mays
atggatcaggcggcggaggagtcttgtgttcccccaggcttcaggttccaccctacggaggaagaactggtgggctactaccttgccaggaaggtggcctcccagaggatcgacctcgacatcatccaggaggtggatctctacaggatagagccgtgggatctgcaagagcggtgcaagccgcagcacgccggcggtgggcacgacgagcagacacaggagtggtacttcttcagctacaaggaccgcaagtaccccagcgggacgaggacgaaccgcgccacggcggccggcttctggaaggccaccggcagggacaaaccggtgctgtcgtcgtccaccaggaccaccaggtgtagcagggtcatcgggatgagaaagacgctggtgttctacaagggcagggcacccaacggcaggaagagcgactggatcatgcacgagtaccgactccaatccaacgagcacgcaccggcgcaggaggaaggctgggtggtgtgccgcgctttccagaagcctatccccaaccagcggcccttcttccccaccagctacgccggctactacgaccacaacctctcaacgacggcacggctgcacgtagacggcgaccgccatttcctggcgggctcatcagcagcagcagcagcactgctacagcagccaccagggcttgcaggcagcagcttcccgcagctgtactccgacgacgacttggagtccaagaagcagctgttgagtatcccgccgctggagagccccactgcgatggcctgctgttccgacgccggcggctacgcgcagagaagcagctacgatgaacatgagatgatgatgatgatgatccagcagggaggaggaggaggagagcaagctgcagccgccatcgactggaactttctggacagcctgctgtccgcgacgtcgcaactgcatgggccctcgggctccttgttgcagtga

SEQ ID NO: 562 - protein, 251 aa, Zea mays
MGRGPVQLRRIENKINRQVTFSKRRNGLLKKAHEISVLCDAEVALIVFSTKGKLYEYSSHSSMEGILERYQRYSFEERAVLNPSIEDQANWGDEYVRLKSKLDALQKSQRQLLGEQLSSLTIKELQQLEQQLDSSLKHIRSRKNQLMFDSISALQKKEKALTDQNGVLQKFMEAEKEKNKALMNAQLREQQNGASTSSPSLSPPIVPDSMPTLNIGPCQHRGAAESESEPSPAPAQANRGNLPPWMLRTVK

SEQ ID NO: 563 - protein, 514 aa, Zea mays
MTYFPEEVVEHIFSFLPSHSDRNTVSLVCKVWYEVERLSRRAVFVGNCYAVRPERVVLRFPNIKALTVKGKPHFADFNLVPPDWGGYAGPWIDAAARSCVGLEELRMKRMVVFDENLELLARSFLRFKVLVLISCEGFSTDGLAAIASHCKLLRELDLQENDVEDRGPRWLSFPDSCTSLVSLNFACIKGEVNSGALERLVARSPNLRSLRLNRSVSVDTLSKILLRAPNLEDLGTGLNLSYTPTLDYSDLAKMVLDCISDKGLQVVASSCKDLQELRVFPSEFYVPGASAVTEEGLVAISSGCPKLTSLLYFCHQMTNEALITVANNCPNFIRFRLCILEPKKPDAMTGQPLDEGFGAIVRECKGLRRLSISGLLTDKVFMYIGKHAKYLEMLSIAFAGDSDKGMMDVMNGCKNLRKLEIRDSPFGDVALLGNVAKYETMRSLWMSSCNVTLKGCQVLASKMPMLNVEIMNELDGSSEMENHGDLSKVDKLYVYRTTAGARDDAPNFVKILQS

SEQ ID NO: 564 - DNA, 7598 bp, Zea mays
ggggaccacttgtgtgtgcgcttagcaatttgtgccctttttctgacaccctcacttcttatccggaagcggtggatagggacacatgcgcccgcccgggtcgcatcccgacccgcgccaccggtccgaccagaccgccgaccggctcagccggttcaccacttctcacttcacctgcctgccgcttcctgctttcccgttcctgaaagagagagaagcatatcctcactctagtctctctcgccccatccccttccccgtccctcctccagctccctctcctccggctgctgcccctccaccgtccgcccctcctccccgctgccggccacttccggacttccccgccgcgttacctcctcctcctggcgcttcccgcttggcggttgcctgggatttacccccgctctgttcccctttcggggaacgccttcagaggcaggacgggtacttggtccgggaggcgcggcgacggcgacagcggcgagtgattttcggtcgccagagggagagttttttttaacggggttttggtgggaaggaaggaggcggccgcgagtaggcgagacgttcatgggttagatctggcggtccggcggcgcggatctgagcgaggtaggctgtcgcattttttgccccctcgggcgtctgtttccatttccttgcagttgcctgcagttggcaggagctgaaggctacccaatctctctctgcaggtttcggtggagagatcgggtggtggtcactatcttcgcctcatttcgagtagatggagcgtctcatggccaaatcgggcatgtatggcggattctgctactgtctgaagcagcgttgcctgcagatctgaaagtcacttggtctccttgcccagttgaccttactgaatgacattgctttccgcggtttgactgtcattacatccttttcggtgtctgatcaaaaatttttagcacgagatgacgtgcttctagttgttgttgatatcttgtcctgagttgagtaaacctgaagctggaaaggagcggatcacattcgtgctcttgctcttgttgacttctaggtctatcttagatacctagaggctggaaggggtcagatccagttcctgtggtcctagtaacaaggtcctcttgggggaaggcgccatgacctacttccccgaggaggtggtagagcacatcttcagcttcttgccatcgcacagcgaccggaacacggtctcccttgtgtgcaaggtgtggtatgaggtcgagaggctgagccgacgagcggtgttcgtagggaactgctacgctgtgcgccctgagcgtgtggtgctgcggttccccaatataaaggccctcacggtgaaggggaagcctcactttgcagacttcaaccttgtgccgcctgattggggtggctacgcagggccatggattgatgcagcagcaaggagctgtgttggtctcgaggagttgcgcatgaagcggatggttgtgtttgatgagaaccttgagctgctagctcggtcattcctgagattcaaagtccttgtccttatcagctgcgaggggtttagcaccgatggtctagctgctattgcgagtcactgcaagtgagttttccaaatgctagtaccttattagagttttctatggcttttttgttaagtgcatcattttgcctttcctgatctgcatcgtaacctttttaaggacgtactgatgccactatttagtccttaagcagcttttgcaagtcattgcaaatgactttgccaagaatatcgaagttcactctttttttctaataaaattaatcaaaaattatttccttggcaacgttgtatgcaattaccttttgatatgtcattatttagtccttaagcagctattgcaaatgatcacgccttgaaaattttgtttctttaagagcgtcacagtttacttccttaacaatgttgtacgcagttacttcttcgtatagggaactagaacagtacacttttgtgctttcttttattttctctaatgcttatcagttaggtgccattgcttgttagttttctataagcttatcttctgattgtgttttcattccattttacaactgttcaagtcatgcattgtcctgctcatgctcccttaatgagctgaactgtgatgaaccattttattcaagtggtatttgatctgttcttgcatttgctctttagatattttaccattttttgctgtatgacttctataatttaattcagtttgatgaattaatacagttttagccatattgcatatagttaagtggttgtgttgtggctgtactgcatatgacttttctaggactggatgcaaattcgcatgcagttattcaacaaattattatcattagtaatatcagtagtagttgaatgcttttagctgaatccgtcaagtttttgttgttacatggtatttcatggttaacgtgttgactctgctttttttcttctatctgttatctaggctcctgagggagttagatttgcaggaaaatgatgtggaggaccgtgggcccagatggctttccttccctgattcctgcacttcgctggtctccttgaatttcgcttgcatcaaaggggaggtgaattctggtgcgttggagagacttgttgctaggtctccaaatctacgcagtttgaggttgaatcgttctgtttcagtagacacactctcaaagatactattgcgagccccaaatttggaagacttggggacaggtaatctgacagatgagttccaagctgagtcctattccaggcttactagtgctctggagaaatgcaaaaagctgagaagtctgtctggattttgggatgcttctcctatttgtgttccgtatatctatcccctctgtcatcaactaacaggcctaaacttgagttatactcccacactggattattctgatctagctaaaatggtcagccgctgtgtgaaactccagcgtctctgggtgagttcccttctctttgtgttggcttgatatttctgtacgttgagagaaccacataatgaatttgatcctccacaggtactggattgcatttcagataagggtttgcaagtggtggcctccagttgcaaggacctacaagaactcagggtgtttccatcagaattttatgttcctggtgcttctgcagtgacagaggagggacttgttgcaatatcgtcaggctgcccaaaactgacctctttgctgtatttctgtcaccagatgaccaatgaagcgctaattactgtagctaataactgcccaaatttcatcagatttagactctgtatccttgagccaaagaagccagatgccatgacaggccagccgttagatgaaggttttggtgcgattgtccgtgaatgcaaagggctaagacgtctgtcaatatcaggtcttctcacagacaaggttttcatgtatattggaaaacatgcaaaatacctcgaaatgctttctatagcatttgctggagatagtgataaggggatgatggacgtgatgaacgggtgcaagaatctgaggaagcttgagatcagagacagtccatttggcgatgttgcactcttgggaaatgttgccaagtatgagacaatgcgatccctttggatgtcttcatgcaatgtcacattaaaggggtgccaggtccttgcatcgaagatgccgatgctcaatgtggagatcatgaatgaactagatggaagtagtgaaatggagaaccatggagacctctctaaagtggacaagttatatgtttaccgcacaactgctggagcgagggatgatgcaccaaattttgttaagatcctacagagctagccgcgactacccttatatcttcccaccttgagaggtgatacttctcttttatccacctttttatctggaagtatcatttgcctgcttatcaatttgtttgatcttctgctagtccattgctgtttgaacttaattcttttgttttgcgcttagtaacttgttgaatattgcattttctaatacatgctccagaacatgcgaactagtatctctaggcccctgttgctcattatattgagaagcaacatctatacgcccattaagatcagatgacattatagaccatatctccaatactgcatgaagaagcttctgctatgtgtttaataatagatcaagcctgtttgccgaaaagatcaaactggatagtactagtactagaattttatctggatagtacttgaagctgatgtttgaaccacttttctgctgcaaaattgtagcatcccatttttgtgtttctctcagtacattgattgtggctactcatagtgctaatttctgtcgaagtgtgaaccactcagattccagtacctatagagagcagcaggacctgatatgtctaaccctgttttcccgctcctactcgattgcttttacagatggtcggtggaatccggcatgcctggggccagggcaacagtggtaagttcttgaatcgtctccccttttgcagggtcaggaaaagccacactggcctgcgcccttatcgtggagcaacacgaccgggaatccatcatcatcctctgtaccaccgcccccctccctttcagtgtctggtcatatggccacccaggcccccctttattacctgtgaattctcccactcgagaggaggggaccgaacggataactttttctagccatgtaacatctctagtgtacttgtctccatttgcttttgacattggcacggtggattgtgttgctggcgtcgctgttgtagtgttttgtttcgcaaacctgagaattatcgggacattccggggacgacgctctgtttcttgctcctgtgaatgcatggactgcatgtaatatttgatggccttgcaggatttatcgtacacacttttcgcccttgcatatttctcgtctcagcccacgtaagcttggttgatattgcatggctaagtgattgttggtcacctggtaaatattgttacgccatcttctacaactaaaacgaagtgatatcgttggtccgccactgcctccctccgttccaccctggcggtggtctcggcatcgctttggatgtgtttggttttgtgtttggttttaggtcaaatagaatgaggtagggttatccttgatttgggggcagggttatttctaactgtcacatctttttttgtttggtagaaaaggataaatttagaaccactctagtttttgtttggatggtggtcgagaggggcggtggcagctatcctagttttcaagacagagaggggcaggtgcttgatttttttgggaacgcgtcgtcacaaaaaattgacggtgttaactttatctctacgtgactcttatataaacatcatataaaatgtggttgtcctcttctatccctctacattcaaccaaacatgtcatgcctccttatcgctcgcttctctgtacacctggttcttggtctcgggtcttgtgccctcgctcatcgttaggggtgataatggaccatgatttaaatgttccttcataaattgttagtacccttaatttattttagttaaaaataaataggaatagagcttgatctcgatctgatccgatccttaaattttgtagtgtaaaatttagagcctattattactcctactcaccgcacgccgccggatgtgatattctttcatcatgtacctctaacagtcgacacccgcatcccgtgctgttgtcctcgcaacgtccacaacgccaccctcgttcagtggcatctcgccgtcgccacccgcttcatgtggcgtcgtccgtcgcaacgcccacactgtcaccctcgtgcagtggacgaaccacatcctttgctgtcatcctccgcaaggcccacactatcacccttgtgaagtggggtagctagattttttcatgagatatgcaagaatttttttcataaataatttagtataatctataatgattatttagtataatctataatgatttggtatacaattcataatataaagataagaatagaatatgaaaatatatatttaatatttaagtccataagtgcatatattagaatgcaaatataatatagaattatctaaacatcaaacacaaaatacactgttagtgtcaagtttttttgggcctcagtggactggtggtctggtgggttggcttagggtatgccacagcccacccataccatccattagctacaacattgtccttgtgactctatcccagccgccctctgcatcgttctcacagtgcacccccgcgactcaacgcacgatctgcaccgttcttgcaacttaccaccgtgactcaagcgcacgatggtccactccgtctgtgtcgtggctgtcgccttccctccccctgcctgatgatcgacgagtgccacagacaccctctccctcgtctcctgcatcacatgtcgttgtcctccgcacatggctggtcctagtatatcaggggttcggagcaaaactaataaggaggcctctcccatccccccacacagttggacaaaaaaatcaaactttagaaccttatatagattatgatcatgtcgttcataaagattgaaaactcaattacgagtttagtgttaaggtgatctagagttgtagagacattgttagcgtcaacgagattggagcaacgaggccatgagggcatcggtgactcagcgtgtcactgcatcacgttaggagtctatgacgatttgttttctatgaccttgacatgctcatcaatttgtttgtccgattctcaacaagttgcaaatagcgattgtactaccaaatggtgactaggctaacgccgattacaaaaaatctataacatacaatgtatacttggtgtatacttaggggccccatagctttgagggcccagtgcggctgcccaccctgcccccttaggaccgatactacctccgcatcgctcatgatgccatcctccgatcttcgtgactctacaccccaagtgcgcgatgagctactctgcctctaccgcgaacacaaccttccctcctcctacctagccatcaacgagcatcgtgagtggcaccgtccaaggagtaccagagaatatgcgtcaagtgagattagtgttattatgcaaagtagtaggatgggctctactctgctacaataggaatgtagaggcatcaattgtcagcataaaacaaaaccacgtgtccaactcctcgaatggaaaggtttctctatcgcacgctattggcagagctctacggtgattaagctactcttgcccgatggcgagagcaaacatcgtcaatcctctccacgagatctcccatgccactattctccaccttttcataggagagcatgagttgggctggtgccacgctgtactcagccgacgctagcgatgtcgcgctggccgctgcacttgcggttgaggaagtaggcgctgcggtcatggtggcgcaacagaaggccgtcgcgtatgtgaaggttgccaccatggctgtagacaagacgaactatgtcatcattgctgtggagaatgtcttcgcgaaggaagctaatgccggtagcttcccaaactggtgttaa

SEQ ID NO: 565 - protein, 277 aa, Arabidopsis thaliana
MDNHTAKDIGMKRSASELALQEYLTTSPLDPCFDLMNRDYTCELRDSLLWSEGLFPAGPFRDAQSSICENLSADSPVSANKPEVRGGVRRTTSGSSHVNSDDEDAETEAGQSEMTNDPNDLKRIRRMNSNRESAKRSRRRKQEYLVDLETQVDSLKGDNSTLYKQLIDATQQFRSAGTNNRVLKSDVETLRVKVKLAEDLVARGSLTSSLNQLLQTHLSPPSHSISSLHYTGNTSPAITVHSDQSLFPGMTLSGQNSSPGLGNVSSEAVSCVSDIWP

SEQ ID NO: 566 - DNA, 1470 bp, Arabidopsis thaliana
ccctctcctctcttttccaaccaattctcttctttcttgtgtgttcacattcaaagaaaatggataatcacacagctaaagacattggtatgaagagaagtgcttctgagctggctctacaagagtatctcactacaagccctctagacccttgtttcgacctcatgaaccgggttagtccttttgttgtctctcttattcgtatcattgttgcttgtgtctatatcaagatccagagatattgtagtaattaagagtctagtttcttttggttgtaggattacacttgtgagttaagagatagtcttttgtggtctgagggattgtttccggctggaccttttcgcgatgcacagtcctcaatctgcggtatgtgcatgtctctttgatttgactccatgtaagtaataagtgttgttgcagttgatattaatgttcactacttgtgtggctcttatctacaaagagaatctgtcagctgatagtccagtgtcagccaataaacctgaggtaagaggaggagttaggagaaccacaagtggatcttctcatgttaactctgatgacgaagatgccgagacagaagcagggcaatctgaaatgactaatgatcccaatgatctgaaacgtattagaaggtatgttaggtaccaataaaaaagttagatgtaaaacactgagatagagaatcaccaattcttcttaatctttttctgtgatgtgaattcaggatgaactcaaacagggaatcagcaaagaggtcgaggagaaggaagcaagagtacttggtagatcttgagactcaggtaaggttaacaaatagcttgttggatgatttgtatcagagagtaatgttttaatggtgaccttgtgttttcttcaaggttgattctttgaaaggcgataactcaacactgtacaagcagctcatagacgcaacacaacagtttcgtagcgctggaacaaataacagagttctcaaatcagatgttgaaactctgagagtcaaggtatcatctatcacttgctcttttcaatttgggaaagtaataaccggaatgtgctaagttaagtaaattctatataggtgaaactagcagaagatttggtagcgagagggtcactcactagcagcttgaatcaacttctacaaactcatctaagtccaccatcacactccatcagcagtctgcactacacgggaaatacctcgcccgccattacagtccacagtgaccaatctttgttccctggaatgacactttctggacagaactcaagccctggacttggtaatgtatccagtgaagctgttagctgcgtctcagacatctggccatgactctctttcttcagaacatgtaatgatcactcagcgaatttcctgtatgtgtttcgctatagaactagaaacatataatgaaagcagcatgttcgttaaataaactcaagtttcgtcaacatatactt

SEQ ID NO: 567 - protein, 406 aa, Zea mays
MVPLCGFCGKQRSMIYCRSDAASLCLSCDRSVHSANALSRRHRRTLLCDRCGLQPASVRCLEDNTSLCQNCDWNGHDAASGASGHKRQAINCYSGCPSSAELSRIWSFIIDIPTVAAEPNCEDGLSMMTIDDSDVTNHHGASDDKRLLEIANTALMSDPPSPDKLKPLIGSSSGDGFDVLPLATDQPAGPVSATPKVPYARDDNKFNDGMYEDLCVDDADLTFENYEELFGTSHIRIEELFDDAGIDSYFEMKETPPFDFNEQPKIVQLQCSDVVPADCAMSNTGERADSSLCIPVRQVRSSISHPLSGLTGESSAGDHQDCGVSPILLMGEPPWYSPGPEGSLAGGSRDSALTRYKEKKKKRMFDKKIRYASRKARADVRKRVKGRFIKAGEAYDYDPLSQTRSY

SEQ ID NO: 568 - protein, 78 aa, Zea mays
MDSSSGSQDKKFRDNDRPEAKEANSTAQHLVDFTEAEEDLVSRMHRLVGNRWEIIAGRIPGRTAEEVEMFWSKKYQER

SEQ ID NO: 569 - protein, 647 aa, Zea mays
MMGGGLMMDQSVVFPGVHNFVDLLQQNGDKNLGFASLMPQTSSGDQCVMGEGDLVDPPPDSFPDAVEDDSDDDVEDIEELERRMWRDRMKLKRLRELQQSRGKDPMASGGGLADGSSKPRQSQEQARRKKMSRAQDGILKYMLKMMEVCRAQGFVYGIIPEKGKPVSGASDNLRAWWKEKVRFDRNGPAAIAKYQADNAVPGAENELASGAASPHSLQELQDTTLGSLLSALMQHCDPPQRRYPLEKGVPPPWWPTGDEEWWPELGIPKDQGPPPYKKPHDLKKAWKVSVLTAVIKHMSPDIEKIRRLVRQSKCLQDKMTAKEISTWLAVVKQEEELYLKMHPGARPPASTGGIASAISFNTTSSEYDVDIVDECKGDEAGNQKTAVTDPTSFNLGAAILSDKFLMPTPMKEETADVEFIQKRNAPAPAEPELMLNNRVYTCNNVQCPHSDYSYGFLDRNARNSHQYTCKYNDPITQSAENKPLPAPPQPQAFQPAFSQANQAANNLDFSLPMDGQRSIAELMNMYDTNFMTSKTMSSSDSVTIMERPNAMPQRIQMDEGFFGQGNGVFDDVNSMMQQQQQQAPPVVQQQQQQQFFIRDDTPFMSQMGDITSTAEFRFGSGFNMSSTAAAADYPGAAQKNDGTNWFY

SEQ ID NO: 570 - protein, 484 aa, Zea mays
MEDVVAVVASLSAPPAPAFSPAAAGLTLIAAAVADPIAAVVVGAMEGVSVPVTVPPVRTASAVDDDALAPGEEGGDASLAGSPCSVVSDCSSVASADFEGVGLCFFGAAAGAEGGPMVLEDSTASAATVEAEARVAAGGRSVFAVDCVPLWGYTSICGRRPEMEDAVAIVPRFFDLPLWLLTGNAMVDGLDPMTFRLPAHFFGVYDGHGGAQVANYCRERLHVALLEQLSRIEETACAANLGDMEFKKQWEKVFVDSYARVDDEVGGNTMRGGGEEAGTSDAAMTLVPEPVAPETVGSTAVVAVICSSHIIVSNCGDSRAVLCRGKQPVPLSVDHKPNREDEYARIEAEGGKVIQWNGYRVFGVLAMSRSIGDRYLKPWIIPVPEVTIVPRAKDDECLILASDGLWDVMSNEEVCEIARKRILLWHKKNSTSSSSAPRVGDSADSAAQAAAECLSKLALQKGSKDNITVVVVDLKAQRKFKSKT

SEQ ID NO: 571 - protein, 654 aa, Zea mays
MWRLTVAEGGGPWLRSTNGFVGRAVWEFDPDLGTPEERDEVERVRQEFSDHRFQRRESADLLMRMQCAKQNRSQRRDLPRIKLGEDEHVTEEIVLSSLRSALDQFSSLQASDGHWPGDFSGIMFIMPGLIFALYVTGSLNVVISPEHRHEICRYIYNHQACHSSLGLSRSLRYLDCLIGQEIIQFSLNYGPFPSFFHFIQEDLICPRTLLQNVIWTSLYRCVEPVLSSWPINKLRERALGNIMEHIHYEDENTQYLCICPVNKALNMVCCWVEDPNSDAFKRHLARIPDFLWISEDGMKAQVYDGCQSWETSFIIQAFCATDLVNDYGSTLQRAYEFMKNSQVMRNHPGDQRYWHRHRSKGSWTLSSADNGWAVSDTTGEALKAVLLLSKISNKNNLVGDPIERERLHDAIDCLLSFANKDGTFSTYECKRTYSWLEILSPCETFPNIVVDYPYPECTSSVLQALILFKDLYPGYRTEEIEALVRSAATFIETKQQEDGSWLGNWGICFTYGAFFSIKGLVASGRTYKNSPCIRKACHFILSKQLSTGGWGESHIAIETQVYVNLKGDRAHAVNTAWAMLALIYAGQFERDPTPLHRAAKELINMQLETGEFPQQEHVGCFNCSLYFNYPSYRNLFPIWALGEYHRGLRAKKDN

SEQ ID NO: 572 - protein, 383 aa, Zea mays
MSPTEEAAGGGGDDYDRLSELKAFDDSKAGVKGLVDAGVTTIPAIFRGHLLQEGPKVSSSSSSSSTSLSIIPVIDLSAADAVAREEVVAQLKAAAETVGFFQLVNHGVPSELLCEMLPSVRRFNEEPHEVKRPYYTRDARRKVRFNSNFDLFQSPAANWRDTLFCEAAPEPPRAEELPVAVRHVMLEYGGAVREVAARVLGLLSEALGLSPGHLAGMGCAEGLSLVCNYYPPCPEPDLTLGCSRHSDPSFLTVLLQDSHAQGGLQALLASRWLDVPPVAGALLVNVGDLLQLVSNGRFKSVEHRVVANRSRDTARVSVACFCNADIARSTRLYGPIAELIAADDSDGAGRALYRNVTVPEFLAHYDKKGLDGRPALHRFQLLQ

SEQ ID NO: 573 - protein, 317 aa, Zea mays
MTRRCSHCSHNGHNSRTCPNRGVKIFGVRLTDGSAIRKSASMGNLSLLSAGSTSGGASPADGPDLADGGGGYASDDFVQGSSSASRERKKGVPWTEEEHRRFLLGLQKLGKGDWRGISRNFVVSRTPTQVASHAQKYFIRQSNMSRRKRRSSLFDMVPDESMDLPPLPGSQEPETSVLNQPPLPPPVEEEEEVESMESDTSAVAESSAASALMPESLQPTYPMIVPAYFSPFLQFSVPFWPNQEDGGDLPQETHEIVKPVAVHSKNPINVDELVSMSKLSIGEPGQETVSTSLSLNLLVGQNRQSAFHANPQTRAQA

SEQ ID NO: 574 - DNA, 6236 bp, Zea mays
cacgtcctcttccagtctccactctccacgtgttccatcccattctcctccccgcgccccgtccccctcgcctcgcttatcccccggacccggccgacccctgctctgctcgacgtgttggcaaaacctcctcctagtcctctcgcagaaggagcttgttttctttaccggcgcggcaacagcgaaagcttctcgatctctctccccgctgctccgccgctgggtacggtggttccgcgcctcggacgcgcccgtgcgggttggttggatccgagctctgtgcagaagcgccgccgcgacacggtcggtgagcgctctttctggctgctgttttcatcgcgagcttggattcagacattcggtgccgtccatgcaaggggtagacggatttgggtgaggagtctattgcttcttcgatcggggattgagtgtttggtctaccgtccttgtttatttagctcgtcggtgttccagggagttcgacgtgtatgggtgtagtgtgttgggctgacaagtctgaactctattttttttcctttctttcctctttgcggacacttcacgtttttattccgtgtcgcgtagaccgtacgcgagtggttcggtttgtttgatttcgcccttgcgcaggcggcctcagctgctaaagtcttgattaaccccgtctaattgcttgtatctgcagccagttcatctggaaagggttttatctgttcttttacaaaggttgcttttgcctactgacgcgtgaatatcgaatagtgatgatagtatattcgcgctttgcttgtacgtgtctgtactctgttgtcccttctgttcaaagcggcaactattcatctgcgtcgaaagggaatccttttgcagcgtgaatttgactgttcttgagcgaaatttgccgcgtttatttgagtggcgcagagagtccgctggcttccagccttccacgagtagccggcaagcgaccagatagagggaaaaaagagagggttagtggtgcactggtgcttaacacctgtatttgttgtacctgaagtttggcatatggccacttattctgtgccacacttaccggtcatgtgcatggaaagcgtccattcgatatgccaagatatgaacatgccacttaaaatgataacttgggaccagggagccatttgcaatagaggtcgcaaaaagtttggttgcacttcgtcctatttgtctctcactcactcagtcactcctatgtgctgatatgctgtgctaagctggcatgaaagactcttgacttcttcagagcattgatgccaattgcaataaaagcgtttgtttgtctccaagatgactattcatcactctatctttcggtggtaccaaatgcattatggtcactctatttgaaggtcttttgaatttactctgcttacctcccccttatgctttacagagattatatgctttgccaatagcgtagtcccaaattatggaagcccccttagattacatgtctgtacttctattctgaaacttcttgtagttatctaatgcgctggctgacagatataggaagaatatctaaatctcaaattttctgtgagggcctcaggggaagcgtcctatgtagctaaatgagggagcggttctgtgttatctatgggtgacaatgagctctaaattttacactataagatttaatgatcggatcatattaggatcaggccctaccattttgtgaagaagcatttggattgtaatccattaccatccctagtgttatcataagactgtcactagctcgtggcagagtgtatgtagatgcatatttttgctgatgtggaacagaataggtatctgtttgcatggcctggggaaaagttgccaatttttctcaatactcaaattttgtctctatgcgaaacagtcagaagtaactataggtttgctgtattgttactcattgtttacttcttaatgcttgtatcacatagaattccactggatccagctgctgaacggggtaccagaaggtggatttggtagtagcactgaacagcgagtggaatttctctaatactgtccaggatcatggttcctctctgtggtttctgtgggaaacaaaggtcaatgatctactgcagatcggatgcggcatcattgtgcttatcatgcgaccgtagcgttcattcagctaatgcactgtctcggcgtcatagaaggacccttctttgtgatcgttgtggtttacagcctgcatcagtccgatgtcttgaggacaacacatcactttgccaaaactgtgattggaatgggcatgatgcagcatcaggggcttctgggcataaaaggcaggccataaactgttactcagggtgcccatcatcagcagagctttcgagaatctggtcatttattatcgatatcccgactgtagctgctgagcccaactgtgaggatgggctaagcatgatgacaattgatgacagtgatgtgactaatcatcacggtgcttcagatgataaacgattgttggaaatagctaacacagcactcatgagtgatccaccttcacctgacaagcttaaacctctgataggctcttcttctggagatgggtttgatgttctgcctctagccacagatcagcctgctggaccagtttcagcgacacctaaggtgcgatgtgccttttcattttttcctccaagaatgtttctgaacgttgtgctttgttttttgcatgtcaaaagacttgttgcttatggcatgcaagttacgtacacatataaaataaagaatgttttcatatgaatatagcataaacatgtagcttggttactgtttcagtcttgcatcagcacagaaagtagtacgtggaaattattccttagtgatgattcccttttctctatttaacactgcctgtctgttttttcctgctgagctctcaatgcccaagtatgttctttttacaatgaaaattccatttttgtaacaagttattagatacatttgcgtcaatggacagttgcaagttgcattggttcgtattgtttcagatcttgtttatcaccagtccctttttaaagaaaaatatgatctattgtcgttgtattcttatcagatgcttgttacatctctcaggtaccttatgccagagatgacaataagttcaatgatggcatgtatgaagacttatgtgtggatgatgctgacctgacattcgagaattatgaagagctattcggtacctctcacattcgaatagaggaactctttgatgacgccggaattgacagttactttgaaatgaaggaaacaccgccttttgatttcaatgaggtatgtactattcttctatactctttgtgattctaaattagtgacattttaggatatcaacatagtctagaaggtgtcaattcggctagggatttctatgaaaatatggcagttcatacaaagctaactaagtgctataaaattacttcatgtaacatgtatcttacactgtcaaagcacacaactatcatatctgatggccgaagtatatattttcatttgaaattttcctcaagctcatgcatcgtctacaccaacttgccgagccatcctgggacctgggtagcttgggcccaatccgatgacaggaacaaacctgcaggggatcactggaatcacctccagacccttctccccctctaccgggccatcacttcggtctgtgttggaaatggcacgaccacatcgttctggttggacgactggctcccctttgacccgatcgtggaacacctgccagatctcgatccgcagccatgtgacatgttgaaccaactgttagccaggttatgcaaactggtgtgatcaacaacctgagaactcgcctcagtcgaactgcccaacgggagaggccattctccaacttgctctgaacaacgtggatatcactgatctgccagatcagcgccggaggtcccctcattgacagcactggcaagttgcactccggagccctttacacaatgatccaatctctgtcagcccccaacctagaggagcctgactttgtgtggaacggttgaagctctttatgtggctcctcaatcaaagcaaaatcaaccacaaagtaagcttggtcgagaaaggtgtgattgccaaccccatctgtgacctctgccttcaagcagacgaagactgccaccacatcttcctctgacctctggtgccactatgcagcttccttctggcacagcgtcgggggtccaaatcccccctggacctgacaacgtccaagctctgggatatcaccctcccacctgcacctgctgccccacgacaccagagcgctctcgtccatctttgctgctgggccatttggaaacaccggaacaacgtcgtcttcaaccaaacgcttccttcagttcagagaatccgaagacagtgccttgaagaagctagattctggagatgtagaattagaggcgactctagcgaaatagacgcatggtgtaatctcttcattagcatgtaccttgaaacaccccctccccccctgtgttgtaaccccggctaccttgctgctcctatcaatcaatatattaaaatcaggtggggacaatcgtcccccctataaaaaaaactgtgggaaagagagctcctgtgcttagttccccaacctacttgtagttggccagggttagtttattttcttacctcagttgttatttatggtttctgttaatttcactcatcaagcctgagttcaggacattttggcacttgaagtattataagtttattttccatccatagaataccctatttttttaacaaaactcaataaatattattatatacacaaaaagatcaaatgttgttgctttactaaaattcttggtcattttttatgttttcagcagcccaaaattgtgcagctacaatgtagcgatgtggtaccagctgattgtgcgatgtcaaacacaggggaaagggctgattccagcctttgtattcctgttaggcaggtcagatctagtatatcccatcccttatctggtttgactggtgagagcagcgctggagatcaccaagactgtggggtgtcaccaattctcctcatgggcgagccaccctggtattctcctggtccagaaggctcattagctggaggaagcagagatagtgctctcacacgatacaaggagaagaagaagaaaagaatgtaagcacgtttaaatgtctgcttgaggttgttctgcgcttaacattcatagatcgtggctatctttttaaggcaaaaaaatgtctccaaccttctgtgtctcttgtttctagtttcgataatgcattttccttgcagaagtcgctgattcacctttccttttcacgaatttggtcgacaggtttgacaagaagatcagatatgcttctcgcaaggctagggcagacgtgaggaagagggtcaagggacggtttataaaggctggcgaagcgtatgactatgatccactaagtcaaactagaagctactgagactgctgagccttgaatgcggctgcttgttgatcgtccagtgtcagcctagcaaatcttcaacggctcgtctgttgtaggtcgttgcgctacaggcaagattactggagagcacagcgattgcaaatttgcaatgcacgcatcagagcctgcagttgaaatacgaaaaaaaaaggttaagaagaggtaccaagggttgggatgaatgaaaaaaaaggaaatacgacgcgaacttgccggacgccttgtggtttggatggagcatacatattcattcttcagttcatctgcagatgagagtgatttggatcagctctgccgtctgtgcgttgaacagatgcagttatgggcgctcgtcctccggctgtgtctaccgctgcgtgcaaggacctgcgtcggccacggtgttcggcagtgagctgccaggattttacagtctgggtaacagcctaacaggatccccttatttattacctcccagcttgcgctctgtaacaatattatttgtgaagcacaacattctcttgtcaggagattgttttcgatcgtgtgtttatgtttgtagatggacgcaatattggtaaaaagaagtagccgtcatgaagtgtgttcttgtcggatcgcatatagcactggggatgagcaggagaatcacacatatttcatctggacgtcgaacctctaactattctatgccagagtaaccttcttgtgctttgtca

SEQ ID NO: 575 - DNA, 1498 bp, Zea mays
tcaaaaaaaaaaaagagccttgggatattggcactagtcgtaatcggcacagctaggtctgaaaggcaaccaccaattctctctctttaaaagcctgagcttggctcatagctctatcttgtccagggactcaataggccagtaggcgattacaagggtggaagaaacatctagccttaacattccaggctacagcctaacccctctaatggatagcagcagtggtagccaggacaagaaattcagagacaatgatcgccctgaagcaaaaggttcaccattttcttgctttgctttgttttgctttacctttgctcgctgcctcttctgaagtctgaacttgtagctttttagttagtaccattgtgttcaagataatagctcatatgactttgttatttcaagagatctcacaccaacatattctaatcctccgtgctttattttctctccgtcccaaaaagaatacaattctagcacagtgttatgtcatagtatcgtaaatttgattaattatagataaaaaagtaccaatatctatgataacaaataaatacgattagattattataagatgtgttttcataataaatttatttggagccataaatctaaatactattcactaaaaacgtgatcaaacatgaaccaatttaaccggcatgtaactcatagttgcattctttttgggacagagtgaatacatgaaaactaaaacagatggtaaacagtgaccatttaggatacactataactgacaaaaactgtggggacaaacaggacgccatgtgatttaccatctgaccagcctaatgaagtgcagaggatttagccccttcgaaatagggggaaattattcctaggaaaattgcaaattctcttggcgaacataggattggcaaaccataatatatttctatatggtttgttaatgttttttttttcttactctcgtgatcaactatatcctttcacaattattgcagaagctaatagcaccgcacagcatcttgttgacttcacggaagcagaggaagatcttgtttccagaatgcacaggcttgtggggaacaggtacacagtacactatatatatatgtgttactaaatcagacaaaataatgtcttccattcccctgattgtgctgttcataccatggcattatgtaggtgggagattatagcaggaagaatcccaggaaggacagcagaagaggtagagatgttctggtccaaaaaataccaggaaagatgaaaccgaggccttagatttatatagatgatatatgcaagcatgtgctgataaataatgttaaactgggcctacgatgttaccggtttttcagcctgtgcacatcttgttatgacatgatgctaattttgcaaaagcacagtaagaaaatttacagaacgtcagaaaatatcaatcatgttttagaagatgtgtaacagtatagtatgccttaagaaaagatgaattttgcctcttgcaacttca

SEQ ID NO: 576 - DNA, 1944 bp, Zea mays
atgatgggaggcgggctgatgatggatcagagcgtggtgttccctggcgtccacaacttcgtggatctcctgcagcagaacggcgacaagaacctgggcttcgcctcactcatgccgcagacgtcctccggcgaccagtgcgtgatgggggagggtgatctcgtggacccaccgccagacagcttcccggacgccgtggaggacgacagcgatgacgacgttgaggacatcgaggagctggagcgccgcatgtggcgcgaccgcatgaagctgaagcggctcagggagctgcagcagagccgcggcaaggatcccatggctagcggtgggggcctggccgacggctcatccaagccaaggcagtcgcaggagcaggcccggcgcaagaagatgtcgcgcgcgcaggacggcatcctcaagtacatgctcaagatgatggaggtgtgccgcgcgcaggggtttgtgtacgggatcattccggagaagggcaagccggtgagcggcgcctccgacaacctccgtgcctggtggaaggagaaggtccgcttcgaccgcaacggcccggccgccatcgccaagtatcaggccgacaacgccgtcccgggcgccgagaatgagctcgcctcgggcgctgccagccctcattccttgcaggagctgcaggacaccacactcggctcgctgctctcagcactcatgcagcactgcgaccccccacagcggcgctacccgctggagaagggcgttcctccaccgtggtggcctaccggcgacgaggagtggtggccggagcttggcattcccaaggaccagggcccacctccctacaagaagccccatgaccttaagaaggcctggaaggtgagcgtgctcaccgctgtcatcaagcacatgtcaccagacatagagaagatccgacgcctcgttcgccagtccaagtgcctccaggacaagatgactgccaaggagatctcgacctggctggcggtcgtcaagcaggaagaggagctgtacctgaagatgcaccctggcgcacgcccgccggcatccactggtggcatcgccagtgccatatctttcaacaccacctcaagcgagtacgacgtggacatcgttgatgagtgcaagggggatgaggctggcaaccagaagacagcagtcactgacccaacctccttcaaccttggtgcggctatcctaagtgacaagttcctcatgccgacgccgatgaaggaggagaccgctgacgtcgagttcatccagaagaggaacgcccccgctcctgctgagccagagctaatgctaaacaaccgggtgtacacctgcaacaacgtccagtgcccgcacagtgactacagctatggattccttgaccggaatgcccgcaacagccaccagtacacctgtaagtacaacgatccgatcactcagagcgccgagaacaagcctctgccagcaccgccgcaaccacaagccttccagccggccttcagccaagccaatcaggcagcgaacaatctggacttcagcctgcctatggacgggcagaggtccatcgccgagctgatgaacatgtacgacaccaacttcatgacgagcaagaccatgagcagtagtgacagcgtcaccatcatggagaggccgaacgcgatgccccagaggatccagatggacgagggcttcttcggacagggcaacggagtcttcgacgacgtcaatagcatgatgcagcaacaacagcagcaggcaccacccgtggtgcagcagcagcagcagcagcagttcttcatccgcgacgacacgccattcatgagccagatgggcgacatcaccagcacggcggagttcaggttcggctctggtttcaacatgtctagcaccgccgccgccgctgattacccaggcgcggcgcagaagaacgacgggaccaattggttctactga

SEQ ID NO: 577 - DNA, 5611 bp, Zea mays
gagcacgcggcagcgcactgcgcacccgatcctcgcgccccccgcgcgtcccgtccccactggcgcggcctcgacacctgtcccccggccccccacgcgcgcgcgcacgggagtgcacgtagctttcctgcccctccgtccctcgcccgcccgcccgtccgtcgcctcgcgcggtcgcgcctcacctcgcccctccctccctcctttctgccggccactcccggctcccgagccacagcaattacccagctcagcggctgccgaaccccctccgcttcccggctctccaggtcgagaagggcgctgctcgccacctgcctttctttctacagttcgacgcactttggtggcggtgccgctactctccttcccgagttcctaacttcctaactaggagggcgggcgttgtctgcctgtgtgcttttggcgattcgggggcttgggctcggatctgcgcgtgccttcctccggacccgagcgaggctcgggcgcgaatttggggcggatcagcgcagatctggaggcacatgaggaggaggaggcggaggggtagcgggagcgatgcggtgcttctgcgaagggcttgagccgacctgggaaggtgattctggaggaggtggcggtggctgcggaggcggagggggaggctggaggagggatggaagacgtcgtagcagtcgtggcgtcactctccgcgccgccggcgccggcgtttagccccgccgcggcggggctcacgctgatcgccgcggcggtcgcggacccgatcgccgcggtggtcgtcggagccatggagggggtctccgtgcccgtgactgtgcccccggtcaggacggcgtccgcggtggacgacgacgcgctggcgccgggagaggaagggggagacgcctctttggccgggagcccgtgctcggtggtcagcgactgtagcagcgtggccagcgctgatttcgagggggtcgggctgtgtttcttcggcgcggcagcaggcgcggagggtggtcccatggtgttggaggactcgaccgcgtctgcagccacggtcgaggcggaggccagggtcgcggctggtgggaggagtgtcttcgccgtggactgcgtgccgctgtggggctacacttccatatgcggccgccgtccggagatggaggatgccgttgctatagtgccgcgattctttgacttgccactctggttgctcaccggcaatgcgatggtcgatggcctcgatcccatgacgttccgcttacctgcacatttctttggtgtctatgacggacacggtggtgcacaggtatgctgcttaccgttcattaatgacttcctattagcagacccatttttggtgctctagtcaagactatatgtactcctaaatcgaacagtttcttgtcggcacagctacattgagtggcatttgctcaattcgttgtaggtagcaaattactgtcgggaacgcctccatgtggccctactggagcagctgagcaggatagaggagactgcgtgtgcagctaacttgggagacatggagttcaagaaacagtgggaaaaggtctttgtggattcttatgctagagtggatgacgaggttgggggaaacacgatgaggggaggtggtgaagaagcaggcacaagtgatgctgctatgacactcgtgccagaacctgtggcacctgagacggtgggttcgacggcggtcgtcgctgtcatctgctcctcacatatcattgtctccaactgtggagattcacgggcagtgctctgccgaggcaagcagcctgtgcctctgtcggtggatcataaagtaagctcttctgcaacgctgtttattttgcatgacctttcggttcatatgttaatcatatgttgactgctttgctcaattcgttattcagcctaacagggaggatgagtatgcaaggattgaggcagagggtggcaaggtcatacaatggaacggttatcgagttttcggtgttcttgcaatgtcgcgatcaattggtacgctttttattactctccagcacactgccttactatatattaagtcaccttggtttactgttcatgagatggtttggttaaggaaatttgaatacatttctattaatgaattaatatttggtttactagttcatcaacatctctgcaacctcaggtattggtgacagggatgcattagtcatttagtttagttataataaaaacttttctacctcatgcttcaatgattcttatgtagtctctggttcaaaacagcacaaaatatgcattgaagggacattacctaaatgtcatctgtgttgattgattgaagtgctattttgctgtgtgctgtcattttttttttgcaaaaaagtaggtggacaaattagcagcctaccatgataaatgatcatttacctgccaaaatacggatgttatgtaagagctgattcaattttcattacttgcaaaatatttctaactttaaactgagcaactatttgtgtttattaaatggccaggaacaattctcttcacattagtgttactccaaattgtgtattacacgatattcttacttccctggctctcctgtgttgtaattttttttaagctctaacttccaagcactgcacatctttcctacaactgttaaattcaaggaagccatgaaagtggattgtgccctttgttatgaaacatggtaagcgaaaggtcctctagccgagttggttaggtcctaggtttgactccccgtgggagcgaatttcaggctatggttaaaaaaaaccccttgtctgtcccacgccaaagcataggtcgtttctcacatgggctacggtgccgctgtgtatgggtggggcaggggttggttttctcgacctgcttgagaaggtcttcttattaataataatgtccggcgggctgtcttaccctccgcagatcgagttatgaaacatggtagtgaattcagatcttgttggaatagagcatccaaagatcctatctgcaacatttcttataccctgaacattctgattctatttccactcatttgattctatctcaagtttctattggccaagaaaggtccgggtcctacaacggttaaatgcaatttttttgtggaattatggaagcactattgtagaactatgtaagatatcattaattatcataaccgatagcttttgatacttacttggttccatacacggttgaaagtcacagaggcctggtctatggtttggtcatgtgtttttgtatggtcacttgtggtgtagataagtgatagatctttcctatactcttgttctcatgtctatgctctaccatcgatggctttgagtctggggagactagtcagcctagctgattcccctcttttccctaaataagcttttttcttatggttgtgcatttgggagcagtcgaggagaaatttgtactttactggggtgatgaaaatcctatgatgttttctatatccttctgcaaagcgaaagggcctctagcctagcggttaaggacttccgagtagcacctccaagtcctgggttcgattcctatcgggagcgaattttcaggcttggttaaaaaaatcccctcgttgtgccccatccgctctcgggtttcgatgtcctgtgcgccaccctccggttgggccgttgcaaagtggacagttgacgccggcccgttagtgatggggggccagggttcggggattttctcggccgggaccattgtttctgtctcttcttatatggaataacgggagggcggtctttccctccccggccgagtttttttatatccttctgcaaagtctctcatatttgtcaccatcttgctgctttgcgttttgaagcagttatttggtggtggtggtggtgtgtgtaacactgcaactgaacatgattgatatgggtattcaatttagagttggggaatttgcatagtattctaatggatggttgattatgtatttatctcctcttttgaaattctaagaatgctctcaatgagactccatgaaaccagtgaagtgttgctttaagttcatatgtcgaacaagatatgatgtttaacatacgcaatgttttctttccgttctctttttgctatagtcaagttatttgcatgtaagtatgttttcaaacggtatctatatacaagtgatttgaaacaaaataggattttgactctgctatcctcatgctcaagtacaatatgaattttttatatagatcatagatcattaaactcatcaatatagagaagcaaattcaaacggatgatccaatgcacaaggtcctgggaatgtttggcaaattgtgctgcttccccatccccttctggagttatcatgccgaaagcatgatgcgttcaaactaatgtagtttgggcagattatcgtcttttgactctgaacatccttgagtgcacccatttctggcattctacgccttcaatattatgccgcatgctgtcttttgacttcttgatttctgaagtacaatgttttccattgtagctctacaatgttttgatgtttgtctgtatatgatgcatacaaactaaaggaggttgctgtttttgtttgtactagcacaagacatgcatagatctttcactgtagtgtagaacatatacctttacactaatttcgaaatctgtctcctctgccatgaactttggtctatcatggaagtgagcacgtttgttgctaggtctcctctgcattagcaaggaccacagaggacacaggacaggacattttttcttcaattcaaatctgcctgtagaagaactgagtactcttagcatgctagttttagttgttttacttgaaacaagattccaagatgcaaaaacatgtattatattatatcataactgtattggcttctatttgttgcaggtgacagatatctgaagccatggataattccagtcccagaggtaacaatagttccgcgggctaaggatgacgagtgccttattcttgccagtgacggcctctgggatgtaatgtcaaatgaagaggtatgtgaaatcgctcgcaagcggatacttctgtggcacaaaaagaacagcacaagctcatcatcagccccacgggttggtgactccgcagactcagccgctcaagcggctgctgaatgcttgtcaaagcttgctcttcagaaggggagcaaagacaacattactgtcgtggtagttgatctgaaagcacagcgcaagttcaagagcaaaacttaaccgtgacaagcgtagcaacaagttgctaagaacctatagattcggacagtcccaagttcggtcattttagttcgctgctttagtgcattgcttagcccagttccttatttttctcagttctttttaagccatgccaagggctgtattccccgtatacggtacagatcgcgaaatccctatcagggatggtttggtgatatcagggtttatatgttttcctgaccgtggtgactgtcctgttttcattcttctttcttcgctgccctgtattcattttgtcaagctggggcaggcatccaagtatttggcaatgtatatttgagcttgcaggatacaaaggaaacgaattgttatgaagggt

SEQ ID NO: 578 - DNA, 26073 bp, Zea mays
gcactagtcgctactagctagatagccatatcaccagcatgtggaggctgacggtggccgagggcggcggcccgtggctgcgctcgacgaacggcttcgtggggcgggcggtgtgggagttcgaccctgacctcggtacgccggaggagcgcgacgaggtagagagggtacgccaggagttctccgaccaccgcttccagaggagagagtcggccgacctcctcatgcgcatgcaggtatacactattatgactattcaaacatgatggacagagcaaaaaaaaaaaatctcataagggctaaattaagccgctacattgatataatcttactaaaactcacaatagacattatagtttgaaatagtgttataataaaaacatcacaattgtattacattaaaatatcgataaacggcaaaaaaacataagggtttcaatgaatctctaatgaatctatataaactcgggagggtagagaggctagagccccaccgtaggggcgaagctaggtacatcacagtaggtgcacccacgaaaaattataaaactagtaatttagactagattttcaccgtatatacatgacctataaattattaccataaatcctcaagacatatgcaccctccactaatttactctggccctgtttgtttcggcttctggcagcttctggtcaccaaaagctgctgcggactgccaaacgctcagcttttcagccagcttctataaaattcgttggagcaaaaaccatccaaaatcaacataaacacataatcggttgagtcgttgtaatagtaggaatccgtcactttctagatcctgagccctataaacaactttatctttctccacaccactacaggaaacgcctaaattttcatgggccaaaaacccacgaaaataagcttaaaccgacgaaaatagattattttcgtcggcataccgacgaaaatagccgccgaaaatatgttagacgaaaataagaaactattttcgtcggtaccgacgaaaataacatattttcgtcggtttgtccaaggccgacggaaatacacaggctatttacgtgggcccatttggccgacgaaaatacacaggctattttcgtgggcctctttggccgacgaaaatacacaggctattttcgtgggcccctttggccgacgaaaatacacaggctattttcgtgggcctcttgaccgacgaaaatacagcagttattttcgtgggccccgttggccgacgaaaattaatgatacccccccaaaacagatttttctgcaccttttaattcacagcaaaatacacataatccacaatgacatatacatatttcacaagcaatacagatttcacaaaccacattcacaagcaataccataattgtttcaaacatagtccatacatagttcatacagttcatacagtttcaataccataatcacatctataataaagtgtacacatagtccatacatagtctataatcaaactcactcctgcgggctgtgggagttttggccactccctcctccgccaccaggaaggtggccactccctccagaaccatggacgaggaagccttggacgttggcagcaccctccgatccctgagcatttgacactgaaccctgcaattcatcaagcattcaaataaggctgtgtattgctatccctaatgtttggtcacgatttgcataaaattaaacatggaacgtcacctgtgatcctgcatgcatccacgggtactgttgtgctggccaccccagaggtggtggcacccaccccgtcggtggcggtgtcatccacgcttgaaatggctgagagcccgccggtggctggaagaccggtggcacccatccccggactggctgcgatccttggggtggtggaggcgtccaagtgcctggaggtgcctgcgtccacccaacaccggtcccgggtggctgcgacgctggagcttgtcctggccactgtccccatccttgtgcatgcgagccattttttataataaaaaagagttgctatggaattgaagtgtttagatagtgttacctggggagggcgaaaagcgggcaagttcatatcagggccgagtctagtagtcatttcctgcaaatggatgcaacgttagaatcgcaacattatactttgaattcaatgacgacacgtgatgagatagacgaattacctgaaaataagaagccatatattgcgtcagctgcccaacctgctcctgcgctgctcgagcctgctcctgtgctgctcgagcctgctcctgtgctgcccgagtctcctcctccagctgagcctctcgagcagacctggaggagcgagaactccctcccgaagacgatgccttcccttgacctattgtcctgttataatccacaacgccggtgccaaaggcaaacctgcatgatacacatagttgagccattaagtggacacattcttgttaatgaaatcgtcgaatcaaacacaaacacctcacctgccatgctttctacccccaccactgtggtacaacgccgagacatctaagtctgaatgcatccagtcgaagtcaggcccatggcgttgagtcatttcctccccatatgcattctgcaaagaaagttagagttggagttagacacaaaatatgcaatttaattcataaatacaaacttgtttaccattttctcccttgccgcctcgctgcatagcacatcagggttagccggatcagggccacggtgaccacggacgtaaacctccataaaacttggagcaactccactttcagcttcctgcatgaaaaagaagagttaaaccatagaattttcatagatgtaacatacaagtttgatttatatacttaccatgcggcgtgcggtaccaaggtgtccatcggcgccgtacctgtgccccggtccttcagtgccacggttggtacggtgcttctgggactctgcaatccactctggcgacgcccatctcttagccaaccacctccaggcttccatgtccttcgccagccaatccacaacgctctccaggtactgctcctctgtgaggtagatctcattggcccctaatgctttgctcattttttgcccctttatcttcttgtagtagtagttgacggccgcgatgcgagcattgtacatggcatccttgattaccttatcagcgcacttccgaaagtgcctcttcacacgtgcccactgagcctgatcctcctcgatctcattcggcaattggaacctcccctacatatcaatggagaagttaagttaaagtaatattaggagaagcaataattcagtgaattgcttatatacgaaagtagactcacccagaactcgtcccacacagccacctgacaagtccttcgtttttgttccgaacttccccctccgctactgctttcccctgactcccctggctggacatagtcctttagaccccagtcggcccactgcatagccgcgaacctctcgccattgagctccaccatgccagggtagtagaagcgacagaggctacccaacaccgcgttcaccttgggacgtctgcctgtaccgtcccaattcaagtcttcccatgacctacaaacattaataaaaaagtaaaccagtgcaatcacattcacattaaaaaattaacacaacagaaataagccccaccattctccatgcggccggatgagcctcctctcggcaggtctcggaccaagcgcattgctctttttatacctaagtatacaagtaaattcaatatgatgaaatgataaaaaaactaatatcaattaaactaatatgcataataatacctgaaggacgtagaaccatctgacgcgtcgcccgcgctgcctttctataggatacatccacctgaattgcactggtccccctaccaaagcttcccaagccaaatgcacaattagatgttgcatcacattgaagaatcctggcgggaaaaccttttcaaatttacaaataaggattggaatttctttctcaaatttctgcatcaacctcttcgataccgtctttgcgcatacttccctatagaagtaactcagctctgcaaatatgctccaaagctcatccttaaaatagcctcgaaacatcacgggcatcagcctctccataataatatggtagtcatggcttttcaaaccgatcaatttaccgatcttcagattgactgcccgtttcagatttgccgcatatcgatctggaaatttcagattcttcaaccacttaaatatttctttcctttcatccggcttgaggcagtaatcagctcgcggcctactctcatgccctttatcgcttactttcaactcgagcatcggcctcttacaaatttcagccatgtcttttcttgccttcatattatctttcgttttatcagtcacatcgaaacatgtgcttatgatgctttcagcaacgttacattcttggtgcatcaagtctatgttgtgcggcatgatcaaggcttttgcatacggaagctcccatattgatgaaatatgggtccagttgtggtcctccccgtagccttggaacctatcattttctccttgcttcagacaagcatgccatgccattatctgcggtgcagttagcctctttggtggcccatttctgattttggctccacttctgaatgcagtaagcgaactcctgaaatcatgcttgaatggagtccaacgtcgatgagcatcaaagaatgacactttcccaccatgcttcaatctgaatgcatccgtatcattcatacatatgggacaacacaaccgaccatgaacacaccatccagaccaatctccatacgctagcagatcatgcactgaccacaaataagcagcgcgcatggtaaactccttttcagtatggctgtcataagccttcacacctctccacaattgtttcagctcttcaattaaagggcgaacaaacatattcagctttggcctggatgctcggggcctgggatgactagtgcaaggaacatgaactcttctttattgaccaactcaggaggaagattatatggcacaatgaagacaggccaacacgagtaagggcttgcactgctattgaaaggtgtgaatccgtccgtcgatagacaggacaacacgttgaaaggtgtgaaacacaaagcaaggctagtggctaaagggtatgctcaaagagaaggagtagacttcgatgaagtgtttgcacctgtagctagactagaaacagtgagagtgttgattgccttagctgctcatgaaaattgggaactacatcacatggatgtaaaatctgcttttctgaatggatacctcaaagaagaagtgtatgtctcacagccaccaggatttcagaaatcagaagtggattcaaaagttttgaggttgaacaaggccctgtatggtctgaaacaagctcccagggcttggaattcaagactagactctgagctgattctgttggggtttgcaaaatgcagtgtggagcatgcagtttatagaaagggctctggtgaatctttgttgatagtaggtgtctatgtggatgacttgattatctgtggcccttcagtaaaagaaattgcagactttaagaggaaaatgaagcagtcatttgacatgagtgatctgggcttgctaacttattatctggggttagaagtcagacagacaacagatgaaatcaccttctgtcagaaggcgtatgcagcaaaattagtggagtctttgaatatgactggttgcaatccaagtgacactccaatggaacaaagaattaagctggtaacggcagaaaagggaactgaaagagatcaaacaaaatacagaagtattgttgggagcctgagatacctcgttaattctagacctgatatatgttttgctgttggtatggtcagcaggttcatggagtcacctggagtagaccactgggctgcagtaaaaagaatcgttagatatgttgctggaactttgggttatggagttagactcaagaaaggcggaggaacaaagttgtcattgctcgggtatactgacagtgactgttcaggggaccttattaagagaaagagcacctctgggattctgtttctcctcggcatgaacctaataacatggtcttcacaaaaacaaagagtagttgctctctcatcttgtgaagctgaatatgtggccgctgcacttggagcctgtcaaggagtctggctgagcatgctagtggcagatatactgaaccgcactgtccaaaagttcaggttgttgatagacaacaagtcagccattgaactaagcaagaatccagtacatcatgacaggagtaagcacattgatacaagatatcattatatccgagattgcatcgagaaagaagtggttgatgtggaacatgtgggtacagacaatcagctggcagacatattgacaaagccacttgcaaggcttaagtttgtcgagctgagaaccaggctgggagtggttcaagttcaacaagattaagggggtgttttgttagacaaataaagtgctgagcaccatgtaatcttgttggaaacagtatttatgctttcagtttttgtttggcgtagtttcatgggtgcctggaacgcgcacagaccatgccatgaccgccatgtgggttaccccgtcgcgacgtcgtgtttgcgttgtgcacgtctctctctgatccgaaattacaggagacgtggagccttcgtgcgacggggaaacggctataagccggatgtatctcgttcattattgagtagagaataaacccagaaaagttgcagccattagtctgcaggccaaaaattctctcgtgtgatattcatccaggtgtgtgtgtctgtgtgtaccggagctcaggcgccggcgtggtaatcgcacgtctcgccgcttgcagacgccggctgatccaagaacccgcagcagtgcttgggttccaacacatattgtgatcaagatgctcatatgtggtgtgggatgttctaagagtagttgagaaactaagtatactgacaacaaatgcaacaacacaattttgtaccttttcttgtagaattctgataatttcagaggagcacgtaggcaaaacaataattggtcaaattagtctctgttacttcaaccatgtaaattaacaccatttctggcatgtattattttctgttcacaaatctgggctcctcagtggcataatctttacttctgatatgtttttagggctgagtaatttcgtaaagcacagggaacatgctttacgagcagcagaagcaacaatgcagcgctgcaaccagatctcgcctgactttttttttaaaatgccacacgcgcagcgcatcacagcagtgcatcgggtcgctaatcgccgagcactgagtcccagacgaagcagggagcggaagggagagatttttaaaaaaacgaagtggggcgacgagcaatccgtcaccaaccgcacctaacacgaagatttcgccgtaaggaaagcaccaaccggatcggaagggaacgtaccggattgaaccgagcctggcggatccggagatggagcctggcgggggcctccctgcggcggatcgaagtggcgtcctcctggacttgccggttgggagcaggtcggcggcggcagtggttgggagcaggtcggcggcggcggtggttgggagcaggccggcggcggcggtggttggctagctgtggggtgcccgcgcgcgacaggggagcaggagtgtcaggacttgcgtcggtcgattcgatgggttttagggccactattttcgtcggcccagaggccgacgaaaataactacattttcgtcggtccagaggcccacgaaaataactacagtattttcatgggcctgcccacgaaaatattcaccgacccacgaaaatacgtcacatttcgtcggtccaaaggccgacgaaaataactacagtattttcatgggcctgcccacgaaaatattccccggcccacgaaaatacgtcacattttcgtcggtcacgaggccgacgaaaataacatccgaattttcgtaggtcggccgacgaaaataaaacggcccacgaaaatttatgcgtttcctgtagtgcacgtaatcgtaataatactcagattctccccacagccagattctccccgcagctagattttcagaaaagctggtgttggggacttgttctcaaatgctaagagttaagaacaaggcaacataaaaagtgttaagtgttaaagtccttcgtccttcgaagcattatgtcccttcgggaaataatgagtttcggacgaaagtcataagagacataccttcgtaaacataacaagtaatgacgaaggattcatataaagcatgaaatataatataagcatcatcatagaatcatttctattttattaacatggaaaaatagaaatgatttcaaattacaaatgtaccttcggtcctgagagaagataaaaagtacaagcgtgacgcaaaagcaaatgccaagtccgcgtgaacagtacgggagtactgttcatctatttatagacgcgggacgcagcccacgtaaaattacatttatgtccattacatttgtcaatgacttatggaaatttgacaaggcccacatagtcttttcatctttaagtcggttcccctctctgctatcgcgacgaagcttccctgcgcacagcttcggctgtgcaccatccttcgtggagcttggtaatcagcccgtccttcgtctggttcaggcttcgtcctgaccgcacttcatgttcgtaattctgagtccgaaggtacctgttcacataatccacttggaaaacattgtcaaatcatgtttttgaggaccttcggaggacgaaggcccccaacagtagcccctcgcaatattaatttgttaatgataaattcagattgcgatatggacgaaggccttgagccgaaggtccgaaaaaacacctggtcagaaaaaagctgaaccaaacaggccctctgtcttcgccactgcccatccgcccactgctagaactgtccttgtgctataccactacggtaccttatactcattctttcataaaatcaaactagtctatattatatagatagaccttgcataaataaaatacttatttagatataattatattttttattttcaaattattagtatatacatatttacaatatctctcctttatatattataaatgggcatgatagttgagctcttcgaaaccaagggagaaggtttgaatctccatcaccctattttttaatatttcgcatggagggaaaaaattattcgctcgctttgctcgctggagtgacacgtgacaaaaaactgttttatattagtaaagataaagatgttattgccgattcttaaagaaagtcaaatgttttaaattgtatttaaatatatttaaatattgatatttacagtgtttaattaatattattagataaattattgaatatacttttataatacacttccttagagtcataaacattgctaatactttttatatatttattaaaaaagttaaataatgaccggcacaaaattttatatttgctggtgtggcatctagcagtgagtaaacatattttgctctagatttttatatacactattatatcctctacgtcttatatatattctagttttacttaatctattatttaaaatattaaaatagatagagaaaaagaagaaaaaaactccctatatatatgacgaaggaacgtcctctatattcagaggacgttactagaaaaggtagggaagaaatctcctctaaagttaggagaccggagtgtttatggtgccatgctaaactcaagacctgatccaaatatttagagctaattattaaccacttaataagttgttagtcgattatagctatattgagatatgtaacaactaatggctattttaggagtataactaataattagttggtgtataagttgacacttttaaacctctcagttaattttagttgctaactattagtttcaaataaagcctctagctaaccacgcattcaccagcgtcgtcaactgtcacaccgcttgcatatgattaaccacacttagatgtgtttgattcagctttctaaactagattcgttgtaaaaaatctataatctcaaccaaataggtacaatagtacagtagattcttgacattttatagatttctctagttcaattcaaaatcaccccatactctagattttttagatttctgtcattcacattacaaactatcattgtttatcaaaatttgtagttgatagttgtttaaaccaaacaaatttcaattcttcataattgtcagctcacggctagaatcatatttttaggagtctataactgaaccaaacataccattaatacctgtttgtcccaaattgaaatttgttttcaagaattaatagatttatacaacatttgatgcatgggaatatctagattcatcatttatttaaatataaatataaaaatcaagagataaaataaatactattttggacggagatagtactgttcagtcactcaatcatattcgtgttacttgattatctatacaaacattatgattatggagggtgtgccgctatctatattttttttgccgtgatacgctccacaattcaatgtattataactttaaatttattagtttgtaaaatataaacaaatatattcagtagtttgattttatctgtagaaataattttaagttaggcaccataagacaaaaaatgattttagaaaaataaattcgtttaaaattttcgaagatattttttttctaagatgacaaaagatattagtgtttctaattgcgttattcttactgatacaaatagtaagatggaattttgtttacgaattttgagatatatttttaaatatttctagtgcgatttaaccgctaaactttctactaaacacgatgtacccctctgatgcgaaaagccatcattagaacaattgaagatgaaaaaaatgttgagcgagggtaaatgggatttgtattcaagaagtaaaatcggacgactgcggtagctgaggcctttttctaacaaaaatattaggctccatttgcgttggattatccagggtccaaggcccaccagatagttgtcgatcgcgttgctggactaatgggcctacggaacagcgcaatggaggtgggcttgggccagcggcggtggcgccgaggcggaggatgcatcgccggggtgggagccttgctgcgagcctgcgacagaggagacagcgttggcgatggcgtccacagtggcgggagcttcctggaagtggatggatgagagcgcaggaagttgaaaggccgatgttttcattccaaccctcacgctttttatttttgtttatttcatcttggagagcagctcttcctaccgatgttcctcaccaattatctcatatatgttcatactcattttttttgaaaaatacatttgtgcttaaattatgtcaaacattttagcagctagctaatcaaaatcgatccttcgttgtagtgcgcaaagcagaacagatctcaacgtcgtgatctgccacgcatcaagcttggggaggatgagcacgtcactgaagaaattgtactgagctccttgaggtcggctctggaccagttctcttcactgcaagccagcgatgggcactggcctggtgatttcagcgggattatgttcatcatgcctggtttggtgcgccttatttctccacaaagcggcgttgcctgttttctccccttgcttagctaagtattttgattcctttctgcgcacttatatagatataacaaatttgcaccttcatatgcagatatttgccttgtatgtcactggatcactgaatgttgtcatatcaccagaacatcggcatgagatttgccgctacatctacaaccaccaggcatgtcatagttctcttggattatctcgctcattaaggtcttgttggagacaaggtcaatttgcaccaaaatgttcactttggatgtatataaggtgattagttaacaattttcttactccttcaataaacaatgtctagaacgaagatggtggatggggcacacttatcctgggttcgagcaccatgtttggcacatgctcaaactacatcaccttgaggcttctcggtgaggagccatacgccaacaacagtgtgttggctaaagggcgtgcttggattctatcccatggtggtgcaaccttgattcctcagtggggaaaaatatggctttcggtattcttcgcaatccatacatgtgtcctagttctgcatacatgcatattaggattcttatttggggaaaaaataaaaatatagcatgttctcatttataagatatgattctccattctagtttcattgacatttcatttgcttttgtatcaattgaaggtacttggattgtttgattggtcaggaaataatccaattttccctgaactatggtccattccccagtttcttccatttcatccaggtatatattccttctatgaaattgtgtcgttccaacttcctataaactatacattggatttgtgtggatctggtggaataagtttgttatatttgttggaagaattgaaaccttaaccctagccaaggttgggagtgcattaatatagctgagtttagtgggccaaggcccattacaatagggtatgcacaataacagaaaagggtacgctaacacaccacagtcacaactctatcctgtatagatgttgagattggaccggaactcggtgaaaatggtagaaggaagccccttggtgaagatgtcggtgaattgcaaagtggccgggacacagagaacacggatattaccggtagcggccgttcctgactttttaggggcccggtgcgaaatccgaaataaaggcctcatccacacacaatatatataatattcaacgtatacaaattataatgcactattttcaagtttataagatgataaatataaaatatagcaaaaacacatacttgttatccgatgtcattaaaaatatcttctaacattttctgatacaaatcattgcttataccattaagatcaatctcatccaacaacttcttttagatacatataatcatcaaaccatttaacctctcttaagtcattgttgaccttaaatagttcaaaaaatatttcaagtttaaaaatcttctctccgtcgatgcaaccatcatgtgtatagtaaataatactctctctgtatcaaaatagaatttattttgcttctctagttgattcctcatcatctagttgaatatagacataaaaatcaaaagttaaaacaaatactattttggaacaaagtgaatattagataagtaattgagacattagtttaacaatctaaacgaaactgattgaaagtgtatcgctcttgcgtatttatgtctagagtagatatgcttagcggtaaaaagtgctaacatccagtgaccagaggggccctctgtttttgggggcccggtgcggccgcacccgccgcaccccctcagggccggccgtggcgacacactcgcagacgaagtggaggtcgatctccacgtgcttcgtgcactgatgctgcacggggttggtggagaggtagaccatgctgaagttgccattgtaaatgggtgaccgaagtgcgcacaaaaacccatgttggtttgtggggatgatatatgatcctagagggctgccaggagtaagtaccgccggtttgggagtggacggggtgttacaaggagcggaaaaaggaagggagtgaggcatcgcgtgtgagagagaagtaggcatgggcgctaggtcgagcccatgcacgccggtgtcggggcgattggagcaagggagttggcgtcaccaggagttgcattcggaagggaggtcgtgggcgcaacaatggatatccacgagtgagaggcgaggggaggggaggaaggggttactgacatccttcatggctgacaaggaccaagacgacgatggctaggggagaatggccgacggctggctagggaggaggtagggagaaaaatggcttgataccatgttaggagaatagaaactttaaccctagtcaggtttggtagtgcattaatatagataagtttagtggggccaaggcccattacaatagggtatgcacaataacagaaaaaggtatgctaacaatatctgctaatgtctctatccatttcagggaaattctggtgctttgcccgtatggtatatctaccaatggcttatctttatggcaagaaatttgttggaccaattacaccaactatattggcactaagagaggaaatctatgacactccttatggaaagattgactggagtgatgctcgtagtaaatgcgcaaaggtttgtcacatcccctctagttccacatgttgaactgtataagtggatttttgtcacacccgggtttaaggacaaatccagatacatctcacatgtgtgctaggatcaagtctcacacatatgatgacagtgcacagaaaataatgtcatatctttattatttaatacaatttctgtacaaaataactaaataaattacaccatttttttatcgaacgcacaggagaactacacatctttatattaaaagggaaggagacaaacccaaagggttttacaagacacagatcctgccaaaagaacaaaaaggaaaagaaaaacaacacaaaaaaacagaacaagaccaaggatctagatgcctaaggacccagccacattcaaagacctagcgagatccagggatccaaggcccttagcaccagccttaacccaacaaactgattcatcaaggaagcttctctgaatccttctcaacgaaggggaatccccatcgaagaccactttattacaatgaagccaaatacaccacgcccctaagatgatgacactgttaagcccctttcttgagcttttggcgacatgaatactcatatgttttagagaaattaaatttgtaatctcttatcaagagaatttaatttgaataatttaaagagtgtttctaattatccagttcatgaaaggaatagtctactttaggagaaaataacttcaaaagtaaggaactcttattaaaagacattttaattcagttcttcttggagaaatttcaccaaagctaattttgggtgttacaaatggtatcatagtcaaccctcgctgtttcacgggcgtgtgtgggctaggggttcgggcatatggtgcatggcacatgtgagctaggagtggtcacatggcatggaatataatgacactagacagacagacgtggccaagaggcgaggttcctggcttggggttgactgacgaggacgtcagccttctaaaaggggtggattgtgatatcctggcacaaggcttaatataattaataaagtactcataccaacaaggtacatattctttttcagaagcctatctcaaaagaacctctgggttaagtgtgcttggcccagagcaatcttgggatgagtgaccgaccgggaagctttatcaggtgcgcacgagtgaggacaaactgcacacaaaagactcatgttggtctatgggaatgatctatgatactagagggctgtcaagagtaagtaccgccagtccgggagtggacggagtgttacaattttctaccttctcctaacagcctaagcttttgggggtgaactagttagtgcgtccactataacatggtatgttcgaatcctggtagaggcatcatttgtgccttcgctcctttatttccacgtttgtgtcttccgctccgggtgcacgtcagtggggatgttgaattgtataagtggattgtttaccttcccctagcagcttaagcatgcacttctatgtttggaatgtttaagcatgctcttctatggtgggaatgtatctgatggtggtgaggtttttataaaattcccaagccgtcttacaaagttctatatcttcaaaacttgctttgatggtctatttactttctgtataaataagtaaaaactatattggctccacgaaccatctggatcatactctgagtatgaatgtgagcaacatactattagaagttaggttatgtgatctatttgtggtcttttgttggattagcctagctcatccaactccatgtcgatagttaggatactattaggtggttatctggattagccctatatctactagcgtattgctcgtgctaatgctatggccccgaggaggggagggggaggggccggcggcggcacgagtgagggggatggggagcgggcgacggggttgcaggaggagccagggggtggtggggtcacgggggagggatgagggatgattcaaacgatctgaatcattggatttgagtaaaagaaaggagggttatcaagcgatctaaattgttcgttttgagggtgtgttatgtgtgggtgcaatttgtttggtggatttagtgaaaattataagtgtgggggtgatttggtttggtgagttttgcaaagttgaaactggtgagttatataggggtatagataacttggttacacttgtggatagctgtccagtgtaactaggctcattccagagaggtggtctgcaatagacgactattatagtttgggtggtgttcagtcctaacttcctaacacctatattcctccctctgcatacaaactaaaaataataacacctacagttttgttttgtgttcatatttgccgaatcctcatattttaattgtaagacaactttagattgttccactcaatgatgggttaactactaggaatatctcttttcttaaccctgttttaaatttcttttaatttctttttggcatctcaggaggacctcatctgtccacgcacactgttgcagaatgttatttggacttcactttataggtgtgtggaaccagtattgagcagttggcctatcaacaagctgagagagagagctctgggaaacatcatggagcatatccattatgaagatgagaacacacaatacctatgcatatgtcctgtgaataaggtaaatatctccaaaagtttgatgtcttgttactggaactttaattgtccatgcttctgttctgttgttgtggtcttattattaattctcctacttcatgatttagtgtttactgtttcttgttaattattgtcttgtggatgatgaacttctgattggtgcctattaatattggttactttgccatttaggctctaaacatggtctgctgctgggtagaagatccaaattcagatgcattcaagcgtcaccttgcaaggataccagacttcttgtggatttcagaagatggcatgaaggcacaggtatagtttttctcctttttatgcacttctggcactcgctaccgtttatatcattctggcggtctgttcgaatatcataataagttaagctagtaatattttcttttagctaagtcatcattattgcatctttactgagtggcagaggaattggcgccaataattcatgtattgcattgggcctttagataatttatagagtatatgacgcagaagataaggcaacccactaacacatatggcaatgtacgagacacaatatgtagactaccaaatatactcttaatacatatggaagtttatgggacattaatatctagactaataaatatactctaacacccccacctcacaataaaaactctagccacgacagatgttgacactagaccgaaactctcagaagaccaaagacgaaagccctttggtgaaaatgtttacaaactgcaatgatgcaggaacatgaagcacatgaatgcaatatgtttggtgtgctgatgttggatggggttggtggagaggtatacgacactaatgttgtcgcagtagacaagtgtactccagcggagaggagagtgaagctcctgcagcagctggtgcaaccagctagctttcgcgatgccatttgcaacaacccggtattcagcctcagcacttgactgaaagatgacgttctgatgcttcaacaaccaaaagatcaagttatcccccgagaaacacaacatagcctgatgtggacctgcgtgaattcggacaactatcctagtcggtattcgtgtagacaacgagctcgtaggtggacgagtggcaaagacaaagaaccgaatctagaataccctaaaggttatgcgcttgagggcaaccatatggggctcataaggattatgcatatggaggtacacctgctgaacaacatgagacacatttggtcgtgtgaatgtgagatattgaagggggctggccactcctatactaggcggcatcctccactgatgacggtaggcctccgataatttgaacgggaggtttataggagtgatacactatttgcagtcaaccatgctggcacgctcaatgatgttttttagataggtgcgctaatggagaaataaaccctcgagtcgccgctccatagtgatgcccaagaagtggtgaagcgacccaaggtccttcatggcgaacttccaataaagagttgaaataatatgtcaaagaagaatattgctggaagccacgaggacaatatcatcaacttaaagcaacatatataccgtctatgcaccccgatggaagataaacagagaagtacccaacttagcctcgtgaaatcctaacgtagcaagaaagaagaaaaccaattatacaaggcccgagacgcctgcttaaacctatagagggacttattgaggcaacataccaagttcggatgtgttgggtcgacaaaaccaactggctgagtagcatatagggtcttgaagagtgtgctatgcagaaaggcattttcacgtcgagttggtgcaccagccagtcatgtgagagtgccaaggacaacaccatgtagacagtggccgatttaacaactaggatgaaagtcttaccatagtcaacgcttgggcgctgagtgaagccatgacacactcaacatgccttgtagccctccaaggatccatcaacgcgccatttatgagtccaaacacatttaccagtgacaacgtttataccacgtggacgaggcaccaggtcccaggtccaattggtaaccaaaaccttgaactcctccatagtccgaagccaattaggatcattgaaagtcgtctagaggggagtgaatatacggaacctgaaattaactaatttaatcacaaacttcaatatgggttagcgttagacgagtataatgtcaatcggagtgcaggagaagggttctccttgcttagagttgctcaatcaattggagattactttaggagccaactcaaatcgatcgcaagcaagagaacaagatagagggaagaggaagaaccaaatcgcaaagattgtaatcaacacaaagacacaacgatttgtttcccgaggttcaactctgaacaatttacatccccgttgacgagtccacaaaggacgagtctctttcaaccctttctctctctcacatggtcacggagattagataagttttcttcacaatctcaaggacaccaagtcccgcaaggacttctacacaaagaatagagtttgttgtctcgctttacaattaaagataatgaggagggagtgagaatgaaaactcaaatcaagatcacaagaactcataactctcaaatgcgcaagccgctaagtctctcaaacacaaatcgatcaaatgcagcgcgagaattgctttggaagcttggagatgttgcacttaatgtgtagtaggttggagtgagtcttgtgccttcaatgtgctggttgggggtatttatagacaccaataaccaaaagagccattggagattagctgcaaaaactgctctgtcgggtggtgcactggactatctagagtgctggtccggtgcacaaccgggcctcggcgtactggcctgtaggttactgttgagtttgtcagccaattgttggcttctgtcagatggcccggttgagagcacctaggaagggggagggtgaataggtgatcctgcaaaaatagcttcaaaaacatacaaaattggtctaataattgaattagagtaaactaaaaccaagtttgaatagagaagatgatagaaaagttcccttcacttgattgctcttccaagatatgaaatattctaagagcaatattctaagtgagttgagagaacttaagaaggaaaaatcgcaataaagtaaatgagacaagagacacaacgatttttatcccgtggttcggtcaagcgtaatatacttgcctgatgaactcaatggataaaggtacactcaacccctctcaagcaatcacaaagatcaacttgagtgccacagtcttcctttatcacttatatcctgtttgtgaggaatctccacaacttggagtctctcatagccttacaaatggtcaatatcgcaacttagagtaagggagggagatagaatacgcacacaagagcaaatcacaacaacacacgctagaaagccaaagaaacgagcgcaagaacacaatatgacaagaacggctcaaaactggcgcttagacctcactaaaatcactagaaagcgtgctcgcagagtttcagagtgttggtatgctcttgagatgcttgtgtgctggttggaggcatctagggggtccttttatagccccaaggggcctaggagccgttgcctcctccaaatggatgctagaaaactttcctctctgcaggtgcaccgtaccgtccacagtaacgctcagtagatcctctgattggtgcctttccttagctaggtggcactggactggtccggcgacgtcagctacccgttggagattggtgactgctagagagagccgttggagaggcagtccggtgcacaccggacatgcactattcatggtccgtttaattttgtattaaaattcccaaaaccgaggacttcgtccatacgccccactagaccgtgcggtgagtcctagacttgcccagagttcgctcttttgagccaaacttctccaacttctttcggctatccttggtagcttccctacgacttagacaaagataattagcacctaatccaattgactaattataggaaacatatcttttccttatagtttcaccaggaattttaatgtggctcaaaacaagtccaaaaagaacttttcttgcagaaatgagttagtagccaaaacaaaaagtgctagaaacatagaatagggagtgtgcaacttattcaaacacttaaatctcttgtttatgttgatttgcccaaatttgcacttttggccctccattttagctcatttggacttgatcttttcaacttgccttcaagtcaacctatgctcatactcatatgaagatagttagttcaagactgtgtgttgagcacttaatcaccaaaacaggtagaaatggccctataacacatttccctttcaccgtttgccaccggtgcgccagcccaaaaataccatttgacatgttccctgcatactcagtctagagccttcaacaaaccagtctgatgcgccagctccaagaagccccgaaaacaacgtccatgcatagacagtccagtgcctcatcggaccggtccgatgcgccagctaagaaatggctaagtctagctcctctgctcagacggtggtgcaccaccggaccagtccagtgcctaagtcatggatcttggactttttattctctccaactcaatttcatgtttttgctcaaactagcttaaaaagagtgtttcattgacactgagctatccaatcactttgcttgagtcaattaagttcctagggctgtatacaaattatccaaggtgtggaactaggtaaagttcctctattccaagttttaccccttttttgttggttttgagctatttctttcctagaactgaaatgaatggtcttatgcacatgtgaatcaaagactaggcaaactagttagtccgtaaggttgtgatggtcatcaagcaccaaaatcaattagagaaaatggttaagcctatttccctttcaatctctcttccccttgcccttgtttttgttgctggcggtaggagcagagggacggggaggcccactagagggtacatagaatgggtggtataacctgcgactgcgactattgaggtcgtgtgccagtttcatagagggcagtggcctcgcccgccattccgtaggtagcaccaggtggtgccattgcagaagagaagtggcactaggctgcagtggttgaggttgactagagcagtgtagctagggagtgggagggcacaaccataccagggaggcagtagcctaagagagggggagaggtaggtggcgcaccctggaaggttagagaggcggcaaaagcagaatggatttgttaattgttaggctctagtaccatgtcagagggattgtcgccaatgattcatgtattgtattgagcatttagatggtttgtacagagtacataatgtaggagataagacaacccatagacacatatggcagtcaacgatacacaatatctagactaccaaatatacactaacacatatggtagtctatgggacacaatatctagactaccaaatctactataaccctgaggactaaactaacataacaattgtagaattggtatgcaattgccttggttatttcttctccagaccccactcatgtaggagccgccagcactaggtctaaagtgtcttagtatggttgcaagtatattggacatgttgaatatgcacaaaaatttacttataggatatagctctgcatgactggtgcgttaccctgataggtatatgatggctgccagagctgggagacatcattcataattcaagcattttgcgctacagatcttgttaatgactatggttcaactcttcagagagcctatgagtttatgaaaaattcacaggtttctttctttatcttgaaatcgtggcaatttttatatatttaccgtcatggcaatgatgaaacacaacatgcatttgtgtacttgaaggtcatgaggaaccatcctggtgaccaacgttattggcatcgccatagatcgaagggttcatggacactttcatctgcagacaatggatgggctgtatctgacactacaggagaagcacttaaggttatttcatgtttgtcatgttttcttttgctgcaatgtagacgagtaaagctaccttttttctctcaaacttgaaggtcagctaccctttactatttttgtcaaacacgcagaggagctgcgtatcattatattaagaaagctactgatcatcattatattgagaagaaatgaaactaaggtcactaagtaccatataatgttattgttaatttacagtgtgtagtaatttaatataatgctcttcttcatatgttgttcattacatgccttctaaaacagcttaccctgactctatttacaggctgtactgttgctgtcaaagatctcaaacaaaaacaaccttgttggggatccaatagaaagagaaaggttgcatgacgctattgattgccttctatcttttgcggtatggattctctaaaattcagtcgtctgatgtgatattatcatttgtttcataccctagaaaaattgcaacacaaaacttgctatcatgcatgcttctgtaagccatggaaatcagaaatgtcacacttattgggatgatatgatgaagtgaagtgtgtagacgaataattctcttaaggaaccaagtttctaaattctgaatttggcacaaattttttctcacctttcaaattttaatcaataaacctaatttagctgtaacagtacatgcttgcgttgcctagcttgttttttaaaaatgttagtgtgccagttgttctaagctatgagataatttcttaattactaatcaccatatgttgtagaacaaagatggcaccttttctacatatgagtgcaaaagaacttattcttggttagaggtaagtttctgtcggctggagctcttatatatccttgttacttcccattaggaaggtgcaatcttaaactttttatttcaatacatcttaatatttctagctccactgtattgacacgtctttttgttaattaactagattctaagtccttgtgagactttcccaaacattgttgtcgattacccgtaagtgatgcatgcaaatggcatatatatttttttagcaaaagatcatgcttacaaaattttcacttcagataaagaattaaaatcatggtgtattatcaattgacagttacccagaatgcacttcatcagtgctccaagctctgatattgttcaaagacttatatcctggttaccgcacagaagagatagaagcattagttagaagtgcagcaacgtttattgagaccaaacaacaagaagacggttcatggtttgtcctaatgcaccatttacccaaagaatttctacgccagcagttgctaacacaaatgaaatagttgttttgcaggttaggtaattggggtatatgtttcacctacggggccttcttttcgattaaaggtttagtcgcttctggaagaacgtacaagaacagcccttgcatacggaaagcatgccacttcatattgtcgaagcagctcagtactggtggatggggagaaagtcatatcgctattgaaactcaggtaaccatattttgtttcacttcatattttgaatccttgttgaagatactagcaataaattgacacatgatatgaatctgtgcgttctaactacgctcatttaatttgttctcaatatgcctttagtctcaagtccctagcgagtcataggtagaatatctttgaacttaccttttcccaccatgcaatcctaaataggtgtatgtaaatctcaaaggtgaccgtgctcacgctgtgaataccgcctgggcaatgctcgctttaatttatgctggacaggtacaggtcattctgtaatttcacatatgaacaagaacctacaatttaccaatctgttcactcacctcttctctaatactagtttgaacgagatccaacgccattacatcgtgctgcaaaggaattgatcaacatgcaactggagacaggagagtttcctcagcaagtaagctccattctgttttcgttgatagtagtacattatattgttgacaagtgaaaactcgttctgttcctcttgatttgtgtttcaaatttatccagagtggttttgttgatgacttgatgtccacttgcgcttaggggtgacaatatgctctaaattttacaatataaaaattcaaggatcagactttatgtctattcacttttgaaccaaaattaatttagggccgtaaaaaattgtgaagaaatattttgatcgtgatccattaccacccctacttgcgttttggtgacaggagcatgtaggatgcttcaactgcagcctctacttcaattacccaagctaccgcaacttgttccccatctgggctctcggtgagtaccatcgtggccttcgtgcaaagaaagacaattgagtccgtgtgtgtatatatatagtacgtatagcattgtgaggaataaaacaggttgcgtcggtggtgagtgcgcaaaaacaagatgtgcttttatgtaggtgtaccacagtgtacaatgttggtcgttgttagactgtaaggctatcatgacgtgtatattgtaatatatatactacgtgattggtgtcctgtatggtcacggccatactcgctgcgtgcgtagagcgcatgattggcttcctgcgcgcgtagaagctaggctgccacgcgccggtgcgatgtaggatattttttcattcatttgctgcatccatggagaagccagggagggacgtttcccacgggccaggatggcgcgcgcctggcgacggtgagcgcgcgaaccaatcacacgttatagtgttccatatgtttcaaattatataagacgttttatcttctctaatgaacgagcagtctcctttccc

SEQ ID NO: 579 - DNA, 1152 bp, Zea mays
atgtcccccacggaagaagccgctggtggtggtggcgacgactatgaccgcttgagcgagctgaaggcgttcgacgacagcaaggccggcgtcaagggcctcgtggacgctggcgtcacgaccatccctgccatcttccgcggccatctccttcaggaagggccgaaggtatcgtcctctagcagtagcagcagtactagtcttagcattatcccggtcatcgacctctcggcggcggacgcagtcgcacgggaggaggtggtcgcccagttgaaggctgcagccgagacggtggggttcttccagctggtgaaccacggcgttcccagcgagctcctgtgcgagatgctgccgtcggtgaggcggttcaacgaggagccccacgaggtgaagcggccctactacacgcgggacgcacgtcgcaaggtgcggttcaactccaacttcgatctgttccagtcgccggcggccaactggcgcgacacgctcttctgcgaggcagcgccggagccgccgcgggcggaggagctgccggtcgccgtcaggcacgtgatgctggagtacggcggcgcggtgcgggaggtggcggcgcgcgtgctggggctgctctcggaggccctggggctgagccccgggcacctcgcagggatggggtgcgcggagggcctcagcctggtgtgcaactactacccgccgtgcccggaaccggacctcaccctgggctgcagcaggcactcggaccccagcttcctgaccgtgctgctgcaggactcgcatgcgcagggcggcctgcaggcgctcctcgcatccaggtggctggacgtgcctccggtggccggcgcgctcctggtgaacgtcggagaccttctccagctggtcagcaacgggcggttcaagagcgtggagcaccgggtggtggctaaccggagcagggacacggcgagagtgtcagtggcgtgcttctgcaacgcggacatcgcgagatccacgaggctgtatggacccatcgcggagctcatcgccgcggacgacagcgacggcgcgggaagggcgctgtacaggaacgtgacggtcccggagttcctagcgcactacgacaagaaaggcctcgacggtcgcccggcgctccaccgcttccagctgcttcaataa

SEQ ID NO: 580 - DNA, 3534 bp, Zea mays
gcaccggctccggtcctcctcccatcaccatcaccaccgtcgttcctctcacgagtcccgacacacgcaaaccgcacgaaccctggctggcggcgggatgacgcggcggtgctcgcactgcagccacaacgggcacaactcgcggacgtgccccaaccgcggggtcaagatcttcggggtgcgcctcaccgatggctcggccatccgcaagagcgcaagcatggggaacctctccctcctctccgcggggtcaaccagcggcggcgcgtcgcccgccgacgggcccgacctcgccgacggcggcgggggctacgcctccgacgacttcgtccaggggtcgtcctccgccagccgcgagcgtaagaaaggtcagttaccgcccgatctctgccccctcctctcgaatcgatcatccacccgctaccactcgatgcagaaccctagataatagatccttccagctctaaccagctccaagtttttccattcatttctctcctgcctactcggcttactctttttagatgcacctagtggctagtgctcactgattaggtacctgtaaggttgggaaacgggtactgcaccggctgagagaaaatcattaatggtaataccacactgtgctgagtactactattgtatcgatattgtactagttgagttgatacatatggtactcgaattcagcccctgactggtgcaaggaccacctgccctatgtcgtttgactgggtcatggggataatttaacaaactcagctctagaaacttttagaaaatgggttatggattgctccaagcagtggtgtcagttgattttgatgaaatttgtcactgattcgttatgctgaatggctgtagaggcatagagggctgcgtaatcaaaggtacagggctgcgtaatcaggaaggatatgccgagcaattgaaaccgctgcgctaactgctgaaacgttgtcttatgtatgccatacatgtgctaatggtcacggtctggtgtaatgtgctactgcactgggatgtaattactattacacagtgccatattccggctgcccatacttgataaggaaacaagttttttcatatgttatggggaaaaatcaaatgcttgatacatgaataccaatgttctgcaagttttatctttattgttaattattgctgctgattcttgtgagatttttacacgaacagtgatatctagttcttgggttacacttggtggtgggtggtaggtgttttaatgtaagtcaagtggcaagaaaagggcaaacacagtgccggaggctcccacatgagtggggtctgcggaagggataaaccgaggcaatcctgtagggtctaagaaaagagtaaaactgagtcaaaccttcccccataaatacagagaggttgtttcaaactcggactgggtgactcatgagacagctctcaccactacactaggcctgcccttcaatgtaagtcaagtggcaccttctgcatattatgcccatctctgttctgattttgtgctgtttggctagtcctctgtttgtcgatgacaccctacctatatgatttgtttaacagcaaggtggtgatgctaacttttaccatagtctgttaatatgctgctgtccattcctttctgttcactggtttcttgttgcttcacatattgctgcctacctgcatggctgcattgctgattgaggttgctcttacaggtgttccttggactgaagaagaacaccggaggtttttgctgggattacaaaagcttgggaaaggtgattggcgagggatttctcgtaatttcgtggtctcaagaacacctactcaagtagcaagtcatgctcaaaaatattttatacgtcaatcaaatatgagcagaaggaagagaaggtctagcctttttgacatggtgcctgatgaggtaacttgcttgatttaccttgattgcttgcttttgccttgttttgtactcatacatgtgttgtaactacactattgctttttttgtaataaatatcatattacttatacttgtgcaacattttggatctagttcagtcgcttgtatgtgttactgacactcattgttcgctgtttaaacattgtgtaaatggtaaaaggccagctgtgtcatttaggccttaaacgttccatcaaatggttggactgtttaaactgtacggtctaaatggcttaaacatgattaaatgggttaaattgctgtttaactcactgtttattcaacaggcagattacaactatcgcattggcaccatactaattaacattgtaagagtggaatttagttcctttcctcaattttttttgctaggatacatattttttacatatgtaaatgtgtatactttctggtatatgtatgtttgacttttgcatacataaaatatgtatattttagtggtactatacaaaagcgtttagatcgtttaactcagtttaaacaccgtctaaacagtgaacactgggtgaccaactgtttactgtttagcatttagataacactggtgacggttatgcgcagtgtcctatccttgatctcattaggtagttcttacggcctgtttggtagagctttatttgttgattcttaattctagcaattttgatggggaagtaggtcagaagtgatttagagtgattctggtggggattaaatgaagtggtggagaggaattttctgtagccatttggctgtccaggagtgattctcacaagaatctggagctgggagcaattactagtgctttgcatataatttgaactgagctgtgctctgtttgttttacagtccatggaccttccaccccttcctggaagtcaagagccagagacctcagtgttaaatcaaccaccactgcctccccctgtggaggaggaggaggaggtggaatcgatggagtcagatacttctgctgttgcggagagttctgcagcttcagctcttatgcccgagagtttacagcctacctatccgatgattgttccagcttatttctcaccgttcttgcaattctcagttcctttctggccaaatcaggaagatggaggtgatctgcctcaagaaacgcacgagattgtcaagcctgttgcagttcattccaagaatccaattaatgttgatgaacttgtgagcatgtcaaagctaagcataggggagcctggtcaggaaacggtgtctacttctctgtcgttaaatctgctggtgggtcaaaataggcagtcggccttccatgcaaatcctcaaacgagggctcaagcttgatcccgcttccgcacagaaactgcattaagaaggattccctctcttttttttttctatatgtaagattgaccgtgctctgtagcttgtatcatgttgtaagttatgctatgtatgaatgtacctgttgtttgtctggcacgcatgacatgccactcatgataacaaactcataatgttagtgctgatctttatggttgtaatgttgtaaacttttctgagagaaaaaaacgtactagccagttgttttc

1-31. (canceled)

32. A method for increasing grain or seed or biomass yield in a plant, the method comprising:
a. expressing in a regenerable plant cell a recombinant DNA construct comprising a regulatory element operably linked to a polynucleotide encoding a polypeptide comprising an amino acid sequence that is at least 80% identical to an amino acid sequence selected from the group consisting of SEQ ID NOS: 1-11, 23-31, 40-299, 563, 565, and 567-573; and
b. generating the plant, wherein the plant comprises in its genome the recombinant DNA construct.

33. The method of claim 32, wherein the regulatory element is a heterologous promoter.

34. The method of claim 32, wherein the polypeptide is at least 90% identical to an amino acid sequence selected from the group consisting of SEQ ID NOS: 1-11, 23-31, 40-299, 563, 565, and 567-573.

35. The method of claim 32, wherein the polynucleotide encodes a polypeptide comprising an amino acid sequence that is at least 95% identical to a full length amino acid sequence selected from the group consisting of SEQ ID NOS: 1-11, 23-31, 40-299, 563, 565, and 567-573.

36. The method of claim 32, wherein the plant cell is from a monocot plant.

37. The method of claim 36, wherein the monocot plant is maize.

38. (canceled)

39. (canceled)

40. (canceled)

41. (canceled)

42. (canceled)

43. (canceled)

44. (canceled)

45. A method for increasing photosynthetic activity in a plant, the method comprising:
a. expressing in a regenerable plant cell a recombinant DNA construct comprising a regulatory element operably linked to a polynucleotide encoding a polypeptide comprising an amino acid sequence that is at least 90% identical to an amino acid sequence selected from the group consisting of SEQ ID NOS: 1-11, 23-31, 40-299, 563, 565, and 567-573; and
b. generating the plant, wherein the plant comprises in its genome the recombinant DNA construct.

46. The method of claim 45, wherein the regulatory element is a heterologous promoter.

47. The method of claim 45, wherein the wherein the plant exhibits increased expression of a polynucleotide that encodes a polypeptide selected from the group consisting of SEQ ID NOS: 40-222, when compared to the control plant.

48. The method of claim 45, wherein the polynucleotide encodes a polypeptide comprising an amino acid sequence that is at least 95% identical to an amino acid sequence selected from the group consisting of SEQ ID NOS: 1-11, 23-31, 40-299, 563, 565, and 567-573.

49. The method of claim 47, wherein the plant cell is from a monocot plant.

50. The method of claim 49, wherein the monocot plant is maize.

51. A method for increasing photosynthetic activity in a plant, the method comprising:
a. introducing in a regenerable plant cell a targeted genetic modification at a genomic locus that encodes a polypeptide comprising an amino acid sequence that is at least 80% identical to an amino acid sequence selected from the group consisting of SEQ ID NOS: 1-11, 23-31, 40-299, 563, 565, and 567-573; and
b. generating the plant, wherein the level and/or activity of the encoded polypeptide is increased in the plant.

52. The method of claim 51, wherein the polynucleotide encodes a polypeptide comprising an amino acid sequence that is at least 95% identical to an amino acid sequence selected from the group consisting of SEQ ID NOS: 1-11, 23-31, 40-299, 563, 565, and 567-573.

53. The method of claim 51, wherein the targeted genetic modification is introduced using a genome modification technique selected from the group consisting of a polynucleotide-guided endonuclease, CRISPR-Cas endonucleases, base editing deaminases, a zinc finger nuclease, a transcription activator-like effector nuclease (TALEN), engineered site-specific meganucleases, or Argonaute.

54. The method of claim 51, wherein the targeted genetic modification is present (a) in the coding region; (b) a non-coding region; (c) a regulatory sequence; (d) an untranslated region; or (e) any combination of (a)-(d) of the genomic locus that encodes the polypeptide.

55. The method of claim 51, wherein the plant cell is from a monocot plant.

56. The method of claim 55, wherein the monocot plant is maize.

57. (canceled)

58. (canceled)
